(19) United States
(12) Patent Application Publication
(10) Pub. No.: US 2025/0090654 A1
(43) Pub. Date: Mar. 20, 2025

(54) CORONAVIRUS VACCINE COMPOSITIONS AND USES THEREOF

(71) Applicant: BOOST BIOPHARMA, INC., Amherst, MA (US)

(72) Inventors: Fritz Schomburg, Madison, WI (US); David Rancour, Madison, WI (US)

(73) Assignee: BOOST BIOPHARMA, INC., Amherst, MA (US)

(21) Appl. No.: 18/725,577

(22) PCT Filed: Dec. 30, 2022
(86) PCT No.: PCT/US2022/082665

§ 371 Date: Jun. 28, 2024

Related U.S. Application Data
(60) Provisional application No. 63/295,782, filed on Dec. 31, 2021.

(51) Int. Cl. A61K 39/215; C07K 14/005

(52) U.S. Cl. CPC A61K 39/215; C07K 14/005; C07K 2319/30; C12N 2770/20022; C12N 2770/20034

(57) ABSTRACT

Provided is a recombinant polypeptide containing at least one immunogenic fragment of Severe Acute Respiratory Syndrome Coronavirus 2 (SARS-CoV-2) spike glycoprotein. Also provided are a method for preventing, inhibiting, reducing, eliminating, protecting, or delaying the onset of an infection or an infectious clinical condition caused by a coronavirus in a subject which includes administering to the subject the recombinant polypeptide, and a method for inducing an immune response against a coronavirus in a subject, which includes administering to the subject the recombinant polypeptide.

### CROSS-REFERENCE TO PRIOR APPLICATION

[0001] This application claims benefit to U.S. Provisional Patent Application No. 63/295,782, filed Dec. 31, 2021, which is hereby incorporated by reference in its entirety.

### INCORPORATION-BY-REFERENCE OF MATERIAL SUBMITTED ELECTRONICALLY

[0002] Incorporated by reference in its entirety herein is a computer-readable nucleotide/amino acid sequence listing submitted concurrently herewith and identified as follows: One 2,422,598 Byte XML file named “SEQL_766400,” created on Dec. 30, 2022.

### BACKGROUND OF THE INVENTION

[0003] The continued rapid evolution of new SARS-CoV-2 variants containing mutations that alter the amino acid sequence of the Spike protein resulting in altered function, and altered resistance to native immune defenses and to immune defenses elicited by currently marketed vaccines has led to a need for alternative platforms that allow for incorporation of new variant mutations in a robust, adaptable, biologically active, and cost-effective vaccine.

### BRIEF SUMMARY OF THE INVENTION

[0004] A recombinant polypeptide comprising at least one immunogenic fragment of Severe Acute Respiratory Syndrome Coronavirus 2 (SARS-CoV-2) spike glycoprotein, wherein each immunogenic fragment comprises an N-terminus region, wherein the N-terminus region comprises an amino acid sequence selected from the group consisting of SEQ ID NOs: 245-289 and 293-362, and amino acid sequences DYS, YS, and S, preferably selected from SEQ ID NOs: 245-248, 250-251, 255-261, 256-258, 293-296, 298-299, 303-309, 304-306, 314-317, 319-320, 324-330, 325-327, 342-345, 347-348, 352-358, and 353-355. In some embodiments, each immunogenic fragment of the recombinant polypeptide further comprises a C-terminus region, wherein the C-terminus region comprises an amino acid sequence selected from the group consisting of SEQ ID NOs: 363-398 and 402-423, and amino acid sequences STN, ST, and S, preferably selected from SEQ ID NOs: 382-397, 382-387, 388-393, 394-397, 385-390, 391-395, and 421-423.

[0005] In some embodiments, each immunogenic fragment further comprises an intervening region between the N-terminus region and the C-terminus region, wherein each intervening region comprises an amino acid sequence selected from the group consisting of SEQ ID NOs: 2045-2050 or that differs at at least 4 residues from an amino acid sequence selected from the group consisting of SEQ ID NOs: 603-606 and 2037-2040.

[0006] Additional embodiments include, but are not limited to, pharmaceutical compositions comprising the recombinant polypeptide and a pharmaceutically acceptable carrier, and methods of using the same.

### BRIEF DESCRIPTION OF THE DRAWINGS

[0007] FIG. 1 is a schematic depicting certain fragments of the SARS-CoV-2 receptor binding domain, namely CTD_shortg (SEQ ID NO: 35), CTD-short_d (SEQ ID NO: 29), CTD_short_h (SEQ ID NO: 37), CTD_short_i (SEQ ID NO:39), CTD_vs_a (SEQ ID NO: 1) and an exemplary intervening region sequence according to an embodiment of the invention (SEQ ID NO: 603).

[0008] FIG. 2A is an SDS-PAGE gel photograph depicting CHO cell expression of the listed constructs expressing certain immunogenic fragments after 5 days. Protein was affinity purified using Protein A agarose from equal volumes of transfected culture. Eluted protein was loaded based on volume, separated by reducing SDS-PAGE, and detected by Coomassie R-250 staining. Load volumes were twice as large for samples (left to right) CTD_vs_a-Fc to RBD_e-Fc compared to the samples on the left of the gel (CTD_long_b-Fc to CTD_short_h-Fc). Expression of CTD_short_g demonstrates protease sensitivity, whereas CTD_short_h, CTD_short_d, and CTD_short_i do not exhibit this sensitivity.

[0009] FIG. 2B is an SDS-PAGE gel photograph depicting CHO cell expression of CTD_short_a-Fc (LS2330) after 5 days. Protein was affinity purified using Protein A agarose and analyzed by reducing SDS-PAGE and detected by Coomassie R-250 staining. M-Molecular weight markers. This construct has very poor expression in terms of yield and protease sensitivity.

[0010] FIG. 2C is an SDS-PAGE gel photograph depicting CHO cell expression of CTD_short_i-Fc (LS2371) after 5 days, demonstrating robust expression with minimal protease sensitivity. Protein was affinity purified using Protein A agarose and analyzed by reducing SDS-PAGE and detected by Coomassie R-250 staining.

[0011] FIG. 3As, 3B, 3C, and 3D are SDS-PAGE gel photographs depicting CHO cell expression of sequential N-terminal deletion mutants of CTD-short-g (CTD-g). Construct naming nomenclature (N-#) indicate the terminus from which the deletion was made and the number of amino acids deleted (anywhere between −1 and −47). “M” is marker. Gel samples are presented left to right with increasing number of deleted amino acids. Full-length protein is seen as the primary band at about 55-60 kDa. A dimer of the protein (an in vitro result of high concentration of purified protein) is found at about 120 kDa.

[0012] FIGS. 4A and 4B are graphs depicting the expression of sequential N-terminal deletion mutants of CTD-short-g (CTD-g) as measured from samples depicted in FIGS. 3A-3D, wherein FIG. 4A depicts absolute expression and FIG. 4B depicts expression relative to CTD-g.

[0013] FIGS. 5A, 5B, and 5C are SDS-PAGE gel photographs depicting CHO cell expression of sequential C-terminal deletion mutants of CTD-short-g (CTD-g). Construct naming nomenclature (C-#) indicate the terminus from which the deletion was made and the number of amino acids deleted (anywhere between −1 and −35). “M” denotes a marker. Gel samples are presented left to right with increasing number of deleted amino acids. Full-length protein is seen as the primary band at about 55-60 kDa. A dimer of the protein (an in vitro result of high concentration of purified protein) is found at about 120 kDa.

[0014] FIGS. 6A and 6B are graphs depicting the expression of sequential C-terminal deletion mutants of CTD-short-g (CTD-g) as measured from samples depicted in FIGS. 5A-5C, wherein FIG. 6A depicts absolute expression and FIG. 6B depicts expression relative to CTD-g.

[0015] FIG. 7 is a set of SDS-PAGE gel photographs depicting expression of certain immunogenic fragment constructs in CHO-S cells or in ExpiCHO cells. “M1” and “M2” denote markers. Full-length protein is seen as the primary band at about 55-60 kDa. A dimer of the protein (an in vitro result of high concentration of purified protein) is found at about 120 kDa. Degraded protein can be seen at about 38 kDa with respect to CTD-short_g grown in CHO-S cells.

[0016] FIGS. 8A, 8B, 8C, 8D, and 8E are SDS-PAGE gel photographs depicting CHO cell expression of certain immunogenic fragments. Fragments are combinations of previously determined N- and C-terminal deletions as indicated in the names, N-# and C-#, where the # is the number of amino acids deleted from the indicated end from CTD-short-g sequence. “M” denotes the marker. Full-length protein is seen as the primary band at about 55-60 kDa. A dimer of the protein (an in vitro result of high concentration of purified protein) is found at about 120 kDa.

### DETAILED DESCRIPTION OF THE INVENTION

[0017] Recombinant polypeptides of the invention can include any suitable immunogenic fragment or fragments of the Severe Acute Respiratory Syndrome Coronavirus 2 (SARS-CoV-2) spike glycoprotein as described herein.

### Description of Immunogenic Fragments

[0018] Immunogenic fragments according to embodiments of the invention are described herein. In certain embodiments, immunogenic fragments include certain regions which are also described herein. For instance, in some embodiments, an immunogenic fragment of SARS-CoV-2 spike glycoprotein comprises an N-terminus region. In some embodiments, an immunogenic fragment of SARS-CoV-2 spike glycoprotein comprises an N-terminus region and a C-terminus region. In some embodiments, an immunogenic fragment of SARS-CoV-2 spike glycoprotein comprises an N-terminus region, an intervening region, and a C-terminus region. In some embodiments, an immunogenic fragment of SARS-CoV-2 spike glycoprotein comprises an N-terminus region, an intervening region that further comprises an N-terminus-adjacent region and/or a C-terminus-adjacent region, and a C-terminus region. Unless otherwise stated, such immunogenic fragment regions can be combined together in any suitable fashion to form immunogenic fragments in accordance with the description herein. In some embodiments, the immunogenic fragments are recombinant and/or isolated.

[0019] In some embodiments, an immunogenic fragment of SARS-CoV-2 spike glycoprotein comprises an N-terminus region and a C-terminus region, wherein the N-terminus region comprises, consists of, or consists essentially of, an amino acid sequence selected from the group consisting of SEQ ID NOs: 245-289 and 293-362, and amino acid sequences DYS, YS, and S, preferably selected from SEQ ID NOs: 245-248, 250-251, 255-261, 256-258, 293-296, 298-299, 303-309, 304-306, 314-317, 319-320, 324-330, 325-327, 342-345, 347-348, 352-358, and 353-355. In some embodiments, the N-terminus region comprises, consists of, or consists essentially of, an amino acid sequence selected from the group consisting of SEQ ID NOs: 245-248, 293-296, 314-317 and 342-345. In some embodiments, the N-terminus region comprises, consists of, or consists essentially of, an amino acid sequence selected from the group consisting of SEQ ID NOs: 250-251, 298-299, 319-320, and 347-348. In some embodiments, the N-terminus region comprises, consists of, or consists essentially of, an amino acid sequence selected from the group consisting of SEQ ID NOs: 255-261, 303-309, 324-330, and 352-358. In some embodiments, the N-terminus region comprises, consists of, or consists essentially of, an amino acid sequence selected from the group consisting of SEQ ID NOs: 256-258, 304-306, 325-327, and 353-355.

[0020] In some embodiments, the N-terminus region comprises, consists of, or consists essentially of an amino acid sequence that differs at a total of 1, 2, 3, 4, 5, 6, 7, 8, 9, 10, 11, 12, 13, 14, or 15 residues from an amino acid sequence selected from the group consisting of SEQ ID NOs: 245-289 and 293-362, and amino acid sequences DYS, YS, and S, preferably selected from SEQ ID NOs: 245-248, 250-251, 255-261, 256-258, 293-296, 298-299, 303-309, 304-306, 314-317, 319-320, 324-330, 325-327, 342-345, 347-348, 352-358, and 353-355. In some embodiments, the amino acid sequence is selected from the group consisting of SEQ ID NOs: 245-248, 293-296, 314-317 and 342-345. In some embodiments, the amino acid sequence is selected from the group consisting of SEQ ID NOs: 250-251, 298-299, 319-320, and 347-348. In some embodiments, the amino acid sequence is selected from the group consisting of SEQ ID NOs: 255-261, 303-309, 324-330, and 352-358. In some embodiments, the amino acid sequence is selected from the group consisting of SEQ ID NOs: 256-258, 304-306, 325-327, and 353-355. In some embodiments, the N-terminus region amino acid sequence differs at 10 residues. In some embodiments, the N-terminus region amino acid sequence differs at 9 residues. In some embodiments, the N-terminus region amino acid sequence differs at 8 residues. In some embodiments, the N-terminus region amino acid sequence differs at 7 residues. In some embodiments, the N-terminus region amino acid sequence differs at 5 residues. In some embodiments, the N-terminus region amino acid sequence differs at 4 residues. In some embodiments, the N-terminus region amino acid sequence differs at 3 residues. In some embodiments, the N-terminus region amino acid sequence differs at 2 residues. In some embodiments, the N-terminus region amino acid sequence differs at 1 residue.

[0021] In some embodiments, the N-terminus region comprises, consists of, or consists essentially of, an amino acid sequence selected from the group consisting of SEQ ID NOs: 245-289 and 293-362, and amino acid sequences DYS, YS, and S, preferably selected from SEQ ID NOs: 245-248, 250-251, 255-261, 256-258, 293-296, 298-299, 303-309, 304-306, 314-317, 319-320, 324-330, 325-327, 342-345, 347-348, 352-358, and 353-355, wherein the total length of the amino acid sequence of the immunogenic fragment, including the N-terminus region, is 203-227 amino acid residues, preferably 203-210, 211-215, 216-220, or 221-227 residues, more preferably 205-210 or 207 residues.

[0022] With regard to regions of immunogenic fragments, immunogenic fragments themselves, and polypeptides containing such fragments, when an amino acid sequence differs or diverges from another amino acid sequence, the differing amino acid residues can be any suitable mutation, including conservative and non-conservative amino acid mutations. Suitable mutations can also include amino acid deletions and additions. For instance, a conservative substitution can replace one aliphatic amino acid (i.e., Glycine, Alanine, Valine, Leucine, Methionine or Isoleucine) for another, one polar, uncharged R group amino acid (i.e., Serine, Cysteine, Threonine, Proline, Asparagine, or Methionine) for another, one positively charged R group amino acid (i.e., Histidine, Lysine, or Arginine) for another, one negatively charged R group amino acid (i.e., Aspartate or Glutamate) for another, and one non-polar, aromatic R group amino acid (i.e., Phenylalanine, Tyrosine, or Tryptophan) for another.

[0023] In some embodiments, the N-terminus region comprises, consists of, or consists essentially of, an amino acid sequence that differs at no residues or at least 1, at least 2, at least 3, at least 4, at least 5, at least 6, at least 7, at least 8, at least 9, at least 10, at least 11, at least 12, at least 13, at least 14, or at least 15 residues from an amino acid sequence selected from the group consisting of SEQ ID NOs: 245-289 and 293-362, and amino acid sequences DYS, YS, and S, preferably selected from SEQ ID NOs: 245-248, 250-251, 255-261, 256-258, 293-296, 298-299, 303-309, 304-306, 314-317, 319-320, 324-330, 325-327, 342-345, 347-348, 352-358, and 353-355. In some embodiments, the amino acid sequence is selected from the group consisting of SEQ ID NOs: 245-248, 293-296, 314-317 and 342-345. In some embodiments, the amino acid sequence is selected from the group consisting of SEQ ID NOs: 250-251, 298-299, 319-320, and 347-348. In some embodiments, the amino acid sequence is selected from the group consisting of SEQ ID NOs: 255-261, 303-309, 324-330, and 352-358. In some embodiments, the amino acid sequence is selected from the group consisting of SEQ ID NOs: 256-258, 304-306, 325-327, and 353-355. In some embodiments, the N-terminus region amino acid sequence differs at 10 residues. In some embodiments, the N-terminus region amino acid sequence differs at least 9 residues. In some embodiments, the N-terminus region amino acid sequence differs at least 8 residues. In some embodiments, the N-terminus region amino acid sequence differs at least 7 residues. In some embodiments, the N-terminus region amino acid sequence differs at least 5 residues. In some embodiments, the N-terminus region amino acid sequence differs at least 4 residues. In some embodiments, the N-terminus region amino acid sequence differs at least 3 residues. In some embodiments, the N-terminus region amino acid sequence differs at least 2 residues. In some embodiments, the N-terminus region amino acid sequence differs at least 1 residue. In some embodiments, the N-terminus region comprises, consists of, or consists essentially of, an amino acid sequence that differs at no more than 1, no more than 2, no more than 3, no more than 4, no more than 5, no more than 6, no more than 7, no more than 8, no more than 9, no more than 10, no more than 11, no more than 12, no more than 13, no more than 14, no more than 15 residues from an amino acid sequence selected from the group consisting of SEQ ID NOs: 245-289 and 293-362, and amino acid sequences DYS, YS, and S, preferably selected from SEQ ID NOs: 245-248, 250-251, 255-261, 256-258, 293-296, 298-299, 303-309, 304-306, 314-317, 319-320, 324-330, 325-327, 342-345, 347-348, 352-358, and 353-355. In some embodiments, the amino acid sequence is selected from the group consisting of SEQ ID NOs: 245-248, 293-296, 314-317 and 342-345. In some embodiments, the amino acid sequence is selected from the group consisting of SEQ ID NOs: 250-251, 298-299, 319-320, and 347-348. In some embodiments, the amino acid sequence is selected from the group consisting of SEQ ID NOs: 255-261, 303-309, 324-330, and 352-358. In some embodiments, the amino acid sequence is selected from the group consisting of SEQ ID NOs: 256-258, 304-306, 325-327, and 353-355. In some embodiments, the N-terminus region amino acid sequence differs at no more than 10 residues. In some embodiments, the N-terminus region amino acid sequence differs at no more than 9 residues. In some embodiments, the N-terminus region amino acid sequence differs at no more than 8 residues. In some embodiments, the N-terminus region amino acid sequence differs at no more than 7 residues. In some embodiments, the N-terminus region amino acid sequence differs at no more than 5 residues. In some embodiments, the N-terminus region amino acid sequence differs at no more than 4 residues. In some embodiments, the N-terminus region amino acid sequence differs at no more than 3 residues. In some embodiments, the N-terminus region amino acid sequence differs at no more than 2 residues. In some embodiments, the N-terminus region amino acid sequence differs at no more than 1 residue.

[0024] In some embodiments, the N-terminus region comprises, consists of, or consists essentially of, an amino acid sequence which differs at a numerical range of residues from an amino acid sequence selected from the group consisting of SEQ ID NO: 245-289 and 293-362, and amino acid sequences DYS, YS, and S preferably selected from SEQ ID NOs: 245-248, 250-251, 255-261, 256-258, 293-296, 298-299, 303-309, 304-306, 314-317, 319-320, 324-330, 325-327, 342-345, 347-348, 352-358, and 353-355. In some embodiments, the amino acid sequence is selected from the group consisting of SEQ ID NOs: 245-248, 293-296, 314-317 and 342-345. In some embodiments, the amino acid sequence is selected from the group consisting of SEQ ID NOs: 250-251, 298-299, 319-320, and 347-348. In some embodiments, the amino acid sequence is selected from the group consisting of SEQ ID NOs: 255-261, 303-309, 324-330, and 352-358. In some embodiments, the amino acid sequence is selected from the group consisting of SEQ ID NOs: 256-258, 304-306, 325-327, and 353-355. In such embodiments, the minimum number of differing residues is any value from the “at least” list recited in the previous paragraph, e.g., 4 residues, and the maximum number of differing residues is any value from the “no more than” list recited in the previous paragraph, e.g., 8 residues, as long as the bottom range value is less than the top range value. For example, a range of differing residues can be 2-5 residues. In some embodiments, the range of differing residues is 1-10, 1-9, 1-8, 1-7, 1-6, 1-5, 1-4, 1-3, 1-2, 2-10, 2-9, 2-8, 2-7, 2-6, 2-5, 2-4, 2-3, 3-10, 3-9, 3-8, 3-7, 3-6, 3-5, 3-4, 4-10, 4-9, 4-8, 4-7, 4-6, 4- 5, 5-10, −5-9, 5-8, 5-7, 5-6, 6-10, 6-9, 6-8, 6-7, 7-10, 7-9, 7-8, 8-10, 8-9, 9-10, 0-10, 0-1, 0-2, 0-3, 0-4, 0-5, 0-6, 0-7, 0-8, 0-9, or 0-10.

[0025] The term “no more than” when used to reference a number of differing residues, includes no residues as well. For example, when a first amino acid sequence differs at no more than two residues from a second amino acid sequence, there can 0, 1 or 2 differing residues between the two sequences.

[0026] In some embodiments, an immunogenic fragment of SARS-CoV-2 spike glycoprotein comprises an N-terminus region and a C-terminus region, wherein the C-terminus region comprises, consists of, or consists essentially of an amino acid sequence selected from the group consisting of SEQ ID NOs: 363-398 and 402-423, and amino acid sequences STN, ST, and S, preferably selected from SEQ ID NOs: 382-397, 382-387, 388-393, 394-397, 385-390, 391-395, and 421-423. In some embodiments, the amino acid sequence is selected from SEQ ID NOs: 382-397. In some embodiments, the amino acid sequence is selected from SEQ ID NOs: 382-387 and 421-423. In some embodiments, the amino acid sequence is selected from SEQ ID NOs: 388-393. In some embodiments, the amino acid sequence is selected from SEQ ID NOs: 394-397. In some embodiments, the amino acid sequence is selected from SEQ ID NOs: 385-390. In some embodiments, the amino acid sequence is selected from SEQ ID NOs: 391-395.

[0027] In some embodiments, an immunogenic fragment of SARS-CoV-2 spike glycoprotein comprises an N-terminus region and a C-terminus region, wherein the C-terminus region comprises, consists of, or consists essentially of an amino acid sequence selected from the group consisting of SEQ ID NOs: 363-398 and 402-423, and amino acid sequences STN, ST, and S, preferably selected from SEQ ID NOs: 382-397, 382-387, 388-393, 394-397, 385-390, 391-395, and 421-423, wherein the total length of the amino acid sequence of the immunogenic fragment, including the N- and C-terminus regions, is 203-227 amino acid residues, preferably 203-210, 211-215, 216-220, or 221-227 residues, more preferably 205-210 or 207 residues.

[0028] In some embodiments, the C-terminus region comprises, consists of, or consists essentially of an amino acid sequence that differs at a total of 1, 2, 3, 4, 5, 6, 7, 8, 9, 10, 11, 12, 13, 14, or 15 residues from an amino acid sequence selected from the group consisting of SEQ ID NOs: 363-398 and 402-423, and amino acid sequences STN, ST, and S, preferably selected from SEQ ID NOs: 382-397, 382-387, 388-393, 394-397, 385-390, 391-395, and 421-423. In some embodiments, the amino acid sequence is selected from SEQ ID NOs: 382-397. In some embodiments, the amino acid sequence is selected from SEQ ID NOs: 382-387 and 421-423. In some embodiments, the amino acid sequence is selected from SEQ ID NOs: 388-393. In some embodiments, the amino acid sequence is selected from SEQ ID NOs: 394-397. In some embodiments, the amino acid sequence is selected from SEQ ID NOs: 385-390. In some embodiments, the amino acid sequence is selected from SEQ ID NOs: 391-395. In some embodiments, the C-terminus region amino acid sequence differs at 10 residues. In some embodiments, the C-terminus region amino acid sequence differs at 9 residues. In some embodiments, the C-terminus region amino acid sequence differs at 8 residues. In some embodiments, the C-terminus region amino acid sequence differs at 7 residues. In some embodiments, the C-terminus region amino acid sequence differs at 5 residues. In some embodiments, the C-terminus region amino acid sequence differs at 4 residues. In some embodiments, the C-terminus region amino acid sequence differs at 3 residues. In some embodiments, the C-terminus region amino acid sequence differs at 2 residues. In some embodiments, the C-terminus region amino acid sequence differs at 1 residue.

[0029] In some embodiments, the C-terminus region comprises, consists of, or consists essentially of, an amino acid sequence that differs at no residues or at least 1, at least 2, at least 3, at least 4, at least 5, at least 6, at least 7, at least 8, at least 9, at least 10, at least 11, at least 12, at least 13, at least 14, or at least 15 residues from an amino acid sequence selected from the group consisting of SEQ ID NOs: 363-398 and 402-423, and amino acid sequences STN, ST, and S, preferably selected from SEQ ID NOs: 382-397, 382-387, 388-393, 394-397, 385-390, 391-395, and 421-423. In some embodiments, the amino acid sequence is selected from SEQ ID NOs: 382-397. In some embodiments, the amino acid sequence is selected from SEQ ID NOs: 382-387 and 421-423. In some embodiments, the amino acid sequence is selected from SEQ ID NOs: 388-393. In some embodiments, the amino acid sequence is selected from SEQ ID NOs: 394-397. In some embodiments, the amino acid sequence is selected from SEQ ID NOs: 385-390. In some embodiments, the amino acid sequence is selected from SEQ ID NOs: 391-395. In some embodiments, the C-terminus region amino acid sequence differs at 10 residues. In some embodiments, the C-terminus region amino acid sequence differs at least 9 residues. In some embodiments, the C-terminus region amino acid sequence differs at least 8 residues. In some embodiments, the C-terminus region amino acid sequence differs at least 7 residues. In some embodiments, the C-terminus region amino acid sequence differs at least 5 residues. In some embodiments, the C-terminus region amino acid sequence differs at least 4 residues. In some embodiments, the C-terminus region amino acid sequence differs at least 3 residues. In some embodiments, the C-terminus region amino acid sequence differs at least 2 residues. In some embodiments, the C-terminus region amino acid sequence differs at least 1 residue. In some embodiments, the C-terminus region comprises, consists of, or consists essentially of, an amino acid sequence that differs at no more than 1, no more than 2, no more than 3, no more than 4, no more than 5, no more than 6, no more than 7, no more than 8, no more than 9, no more than 10, no more than 11, no more than 12, no more than 13, no more than 14, or no more than 15 residues from an amino acid sequence selected from the group consisting of SEQ ID NOs: 363-398 and 402-423, and amino acid sequences STN, ST, and S, preferably selected from SEQ ID NOs: 382-397, 382-387, 388-393, 394-397, 385-390, 391-395, and 421-423. In some embodiments, the amino acid sequence is selected from SEQ ID NOs: 382-397. In some embodiments, the amino acid sequence is selected from SEQ ID NOs: 382-387 and 421-423. In some embodiments, the amino acid sequence is selected from SEQ ID NOs: 388-393. In some embodiments, the amino acid sequence is selected from SEQ ID NOs: 394-397. In some embodiments, the amino acid sequence is selected from SEQ ID NOs: 385-390. In some embodiments, the amino acid sequence is selected from SEQ ID NOs: 391-395. In some embodiments, the C-terminus region amino acid sequence differs at no more than 10 residues. In some embodiments, the C-terminus region amino acid sequence differs at no more than 9 residues. In some embodiments, the C-terminus region amino acid sequence differs at no more than 8 residues. In some embodiments, the C-terminus region amino acid sequence differs at no more than 7 residues. In some embodiments, the C-terminus region amino acid sequence differs at no more than 5 residues. In some embodiments, the C-terminus region amino acid sequence differs at no more than 4 residues. In some embodiments, the C-terminus region amino acid sequence differs at no more than 3 residues. In some embodiments, the C-terminus region amino acid sequence differs at no more than 2 residues. In some embodiments, the C-terminus region amino acid sequence differs at no more than 1 residue.

[0030] In some embodiments, the C-terminus region comprises, consists of, or consists essentially of, an amino acid sequence which differs at a numerical range of residues from an amino acid sequence selected from the group consisting of SEQ ID NO: 363-398 and 402-423, and amino acid sequences STN, ST, and S, preferably selected from SEQ ID NOs: 382-397, 382-387, 388-393, 394-397, 385-390, 391-395, and 421-423. In some embodiments, the amino acid sequence is selected from SEQ ID NOs: 382-397. In some embodiments, the amino acid sequence is selected from SEQ ID NOs: 382-387 and 421-423. In some embodiments, the amino acid sequence is selected from SEQ ID NOs: 388-393. In some embodiments, the amino acid sequence is selected from SEQ ID NOs: 394-397. In some embodiments, the amino acid sequence is selected from SEQ ID NOs: 385-390. In some embodiments, the amino acid sequence is selected from SEQ ID NOs: 391-395. In such embodiments, the minimum number of differing residues is any value from the “at least” list recited in the previous paragraph, e.g., 4 residues, and the maximum number of differing residues is any value from the “no more than” list recited in the previous paragraph, e.g., 6 residues, as long as the bottom range value is less than the top range value. For example, a range of differing residues can be 4-7. In some embodiments, the range of differing residues is 1-10, 1-9, 1-8, 1-7, 1-6, 1-5, 1-4, 1-3, 1-2, 2-10, 2-9, 2-8, 2-7, 2-6, 2-5, 2-4, 2-3, 3-10, 3-9, 3-8, 3-7, 3-6, 3-5, 3-4, 4-10, 4-9, 4-8, 4-7, 4-6, 4-5, 5-10, −5-9, 5-8, 5-7, 5-6, 6-10, 6-9, 6-8, 6-7, 7-10, 7-9, 7-8, 8-10, 8-9, 9-10, 0-10, 0-1, 0-2, 0-3, 0-4, 0-5, 0-6, 0-7, 0-8, 0-9, or 0-10.

[0031] In some embodiments, the immunogenic fragment of SARS-CoV-2 spike glycoprotein comprises an N-terminus region and a C-terminus region, wherein the N-terminus region comprises an amino acid sequence selected from the group consisting of SEQ ID NOs: 245-289 and 293-362, and amino acid sequences DYS, YS, and S, preferably selected from SEQ ID NOs: 245-248, 250-251, 255-261, 256-258, 293-296, 298-299, 303-309, 304-306, 314-317, 319-320, 324-330, 325-327, 342-345, 347-348, 352-358, and 353-355, and the C-terminus region comprises an amino acid sequence selected from the group consisting of SEQ ID NOs: 363-398 and 402-423, and amino acid sequences STN, ST, and S, preferably selected from SEQ ID NOs: 382-397, 382-387, 388-393, 394-397, 385-390, 391-395, and 421-423. In some embodiments, the N-terminus amino acid sequence is selected from the group consisting of SEQ ID NOs: 245-248, 293-296, 314-317 and 342-345. In some embodiments, the N-terminus amino acid sequence is selected from the group consisting of SEQ ID NOs: 250-251, 298-299, 319-320, and 347-348. In some embodiments, the N-terminus amino acid sequence is selected from the group consisting of SEQ ID NOs: 255-261, 303-309, 324-330, and 352-358. In some embodiments, the N-terminus amino acid sequence is selected from the group consisting of SEQ ID NOs: 256-258, 304-306, 325-327, and 353-355. In some embodiments, the C-terminus amino acid sequence is selected from SEQ ID NOs: 382-397. In some embodiments, the C-terminus amino acid sequence is selected from SEQ ID NOs: 382-387 and 421-423. In some embodiments, the C-terminus amino acid sequence is selected from SEQ ID NOs: 388-393. In some embodiments, the C-terminus amino acid sequence is selected from SEQ ID NOs: 394-397. In some embodiments, the C-terminus amino acid sequence is selected from SEQ ID NOs: 385-390. In some embodiments, the C-terminus amino acid sequence is selected from SEQ ID NOs: 391-395. Any combination of N-terminus region and C-terminus region sequences can be used in an immunogenic fragment, for example, an N-terminus region comprising an amino acid sequence of SEQ ID NO: 258 and a C-terminus region comprising an amino acid sequence of SEQ ID NO: 395. In some embodiments, the total length of the amino acid sequence of the immunogenic fragment, including the N- and C-terminus regions, is 203-227 amino acid residues, preferably 203-210, 211-215, 216-220, or 221-227 residues, more preferably 205-210 or 207 residues.

[0032] In certain embodiments, an immunogenic fragment according to the invention further comprises an intervening region located between the N-terminus region and the C-terminus region. The intervening region can comprise, consist of, or consist essentially of, any suitable amino acid sequence.

[0033] In some embodiments, the intervening region comprises, consists of, or consists essentially of, an amino acid sequence with at least 60%, at least 61%, at least 62%, at least 63%, at least 64%, at least 65%, at least 66%, at least 67%, at least 68%, at least 69%, at least 70%, at least 71%, at least 72%, at least 73%, at least 74%, at least 75%, at least 76%, at least 77%, at least 78%, at least 79%, at least 80%, at least 81%, at least 82%, at least 83%, at least 84%, at least 85%, at least 86%, at least 87%, at least 88%, at least 89%, at least 90%, at least 91%, at least 92%, at least 93%, at least 94%, at least 95%, at least 96%, at least 97%, at least 98%, or at least 99% identity to an amino acid sequence selected from the group consisting of SEQ ID NO: 603-606, 2037-2040, and 2045-2050. In some embodiments, the intervening region comprises, consists of, or consists essentially of, an amino acid sequence with no more than 70%, no more than 71%, no more than 72%, no more than 73%, no more than 74%, no more than 75%, no more than 76%, no more than 77%, no more than 78%, no more than 79%, no more than 80%, no more than 81%, no more than 82%, no more than 83%, no more than 84%, no more than 85%, no more than 86%, no more than 87%, no more than 88%, no more than 89%, no more than 90%, no more than 91%, no more than 92%, no more than 93%, no more than 94%, no more than 95%, no more than 96%, no more than 97%, no more than 98%, or no more than 99% identity to an amino acid sequence selected from the group consisting of SEQ ID NO: 603-606, 2037-2040, and 2045-2050. In one embodiment, the amino acid sequence has no more than 90% identity. In one embodiment, the amino acid sequence has no more than 91% identity. In one embodiment, the amino acid sequence has no more than 92% identity. In one embodiment, the amino acid sequence has no more than 93% identity. In one embodiment, the amino acid sequence has no more than 94% identity. In one embodiment, the amino acid sequence has no more than 95% identity. In one embodiment, the amino acid sequence has no more than 96% identity. In one embodiment, the amino acid sequence has no more than 97% identity. In one embodiment, the amino acid sequence has no more than 98% identity. In one embodiment, the amino acid sequence has no more than 99% identity.

[0034] In some embodiments, the intervening region comprises, consists of, or consists essentially of, an amino acid sequence with a range of percent identity to an amino acid sequence selected from the group consisting of SEQ ID NO: 603-606, 2037-2040, and 2045-2050, wherein the percent identity value for the bottom of the range is any value from the “at least” list of values recited in the previous paragraph, e.g., 60%, and the percent identity value for the top of the range is any value from “no more than” list recited in the previous paragraph, e.g., 88%, as long as the bottom range value is less than the top range value. For example, a range of percent identity can be between at least 84% and 98% identity. In one embodiment, the range is 90-99, 90-98, 90-97, 90-96, 90-95, 90-94, 90-93, 90-92, 90-91, 91-99, 91-98, 91-97, 91-96, 91-95, 91-94, 91-93, 91-92, 92-99, 92-98, 92-97, 92-96, 92-95, 92-94, 92-93, 93-99, 93-98, 93-97, 93-96, 93-95, 93-94, 94-99, 94-98, 94-97, 94-96, 94-95, 95-99, 95-98, 95-97, 95-96, 96-99, 96-98, 96-97, 97-99, 97-98, or 98-99.

[0035] In some embodiments, the intervening region comprises, consists of, or consists essentially of, an amino acid sequence that differs at 1, 2, 3, 4, 5, 6, 7, 8, 9, 10, 11, 12, 13, 14, 15, 16, 17, 18, 19, 20, 21, 22, 23, 24, 25, 26, 27, 28, 29, 30, 31, 32, 33, 34, 35, 36, 37, 38, 39, 40, 41, 42, 43, 44, 45, 46, 47, 48, 49, or 50 residues from an amino acid sequence selected from the group consisting of SEQ ID NOs: 603-606, 2037-2040, and 2045-2050. In some embodiments, the intervening region amino acid sequence differs at 20 residues. In some embodiments, the intervening region amino acid sequence differs at 19 residues. In some embodiments, the intervening region amino acid sequence differs at 18 residues. In some embodiments, the intervening region amino acid sequence differs at 17 residues. In some embodiments, the intervening region amino acid sequence differs at 16 residues. In some embodiments, the intervening region amino acid sequence differs at 15 residues. In some embodiments, the intervening region amino acid sequence differs at 14 residues. In some embodiments, the intervening region amino acid sequence differs at 13 residues. In some embodiments, the intervening region amino acid sequence differs at 12 residues. In some embodiments, the intervening region amino acid sequence differs at 11 residues. In some embodiments, the intervening region amino acid sequence differs at 10 residues. In some embodiments, the intervening region amino acid sequence differs at 9 residues. In some embodiments, the intervening region amino acid sequence differs at 8 residues. In some embodiments, the intervening region amino acid sequence differs at 7 residues. In some embodiments, the intervening region amino acid sequence differs at 5 residues. In some embodiments, the intervening region amino acid sequence differs at 4 residues. In some embodiments, the intervening region amino acid sequence differs at 3 residues. In some embodiments, the intervening region amino acid sequence differs at 2 residues. In some embodiments, the intervening region amino acid sequence differs at 1 residue.

[0036] In some embodiments, the intervening region comprises, consists of, or consists essentially of, an amino acid sequence that differs at no residues or at least 1, at least 2, at least 3, at least 4, at least 5, at least 6, at least 7, at least 8, at least 9, at least 10, at least 11, at least 12, at least 13, at least 14, at least 15, at least 16, at least 17, at least 18, at least 19, at least 20, at least 21, at least 22, at least 23, at least 24, at least 25, at least 26, at least 27, at least 28, at least 29, at least 30, at least 31, at least 32, at least 33, at least 34, at least 35, at least 36, at least 37, at least 38, at least 39, at least 40, at least 41, at least 42, at least 43, at least 44, at least 45, at least 46, at least 47, at least 48, at least 49, or at least 50 residues from an amino acid sequence selected from the group consisting of SEQ ID NOs: 603-606, 2037-2040, and 2045-2050. In some embodiments, the intervening region amino acid sequence differs at at least 20 residues. In some embodiments, the intervening region amino acid sequence differs at at least 19 residues. In some embodiments, the intervening region amino acid sequence differs at at least 18 residues. In some embodiments, the intervening region amino acid sequence differs at at least 17 residues. In some embodiments, the intervening region amino acid sequence differs at at least 16 residues. In some embodiments, the intervening region amino acid sequence differs at at least 15 residues. In some embodiments, the intervening region amino acid sequence differs at at least 14 residues. In some embodiments, the intervening region amino acid sequence differs at at least 13 residues. In some embodiments, the intervening region amino acid sequence differs at at least 12 residues. In some embodiments, the intervening region amino acid sequence differs at at least 11 residues. In some embodiments, the intervening region amino acid sequence differs at at least 10 residues. In some embodiments, the intervening region amino acid sequence differs at at least 9 residues. In some embodiments, the intervening region amino acid sequence differs at at least 8 residues. In some embodiments, the intervening region amino acid sequence differs at at least 7 residues. In some embodiments, the intervening region amino acid sequence differs at at least 5 residues. In some embodiments, the intervening region amino acid sequence differs at at least 4 residues. In some embodiments, the intervening region amino acid sequence differs at at least 3 residues. In some embodiments, the intervening region amino acid sequence differs at at least 2 residues. In some embodiments, the intervening region amino acid sequence differs at at least 1 residue.

[0037] In some embodiments, the intervening region comprises, consists of, or consists essentially of, an amino acid sequence that differs at no more than 1, no more than 2, no more than 3, no more than 4, no more than 5, no more than 6, no more than 7, no more than 8, no more than 9, no more than 10, no more than 11, no more than 12, no more than 13, no more than 14, no more than 15, no more than 16, no more than 17, no more than 18, no more than 19, no more than 20, no more than 21, no more than 22, no more than 23, no more than 24, no more than 25, no more than 26, no more than 27, no more than 28, no more than 29, no more than 30, no more than 31, no more than 32, no more than 33, no more than 34, no more than 35, no more than 36, no more than 37, no more than 38, no more than 39, no more than 40, no more than 41, no more than 42, no more than 43, no more than 44, no more than 45, no more than 46, no more than 47, no more than 48, no more than 49, or no more than 50 residues from an amino acid sequence selected from the group consisting of SEQ ID NO: 603-606, 2037-2040, and 2045-2050. In some embodiments, the intervening region amino acid sequence differs at no more than 20 residues. In some embodiments, the intervening region amino acid sequence differs at no more than 19 residues. In some embodiments, the intervening region amino acid sequence differs at no more than 18 residues. In some embodiments, the intervening region amino acid sequence differs at no more than 17 residues. In some embodiments, the intervening region amino acid sequence differs at no more than 16 residues. In some embodiments, the intervening region amino acid sequence differs at no more than 15 residues. In some embodiments, the intervening region amino acid sequence differs at no more than 14 residues. In some embodiments, the intervening region amino acid sequence differs at no more than 13 residues. In some embodiments, the intervening region amino acid sequence differs at no more than 12 residues. In some embodiments, the intervening region amino acid sequence differs at no more than 11 residues. In some embodiments, the intervening region amino acid sequence differs at no more than 10 residues. In some embodiments, the intervening region amino acid sequence differs at no more than 9 residues. In some embodiments, the intervening region amino acid sequence differs at no more than 8 residues. In some embodiments, the intervening region amino acid sequence differs at no more than 7 residues. In some embodiments, the intervening region amino acid sequence differs at no more than 5 residues. In some embodiments, the intervening region amino acid sequence differs at no more than 4 residues. In some embodiments, the intervening region amino acid sequence differs at no more than 3 residues. In some embodiments, the intervening region amino acid sequence differs at no more than 2 residues. In some embodiments, the intervening region amino acid sequence differs at no more than 1 residue.

[0038] In some embodiments, the intervening region comprises, consists of, or consists essentially of, an amino acid sequence with a range of residues at which the sequence differs from an amino acid sequence selected from the group consisting of SEQ ID NO: 603-606, 2037-2040, and 2045-2050, wherein the minimum number of differing residues is any value from the “at least” list recited above two paragraphs previous, e.g., 4 residues, and the maximum number of differing residues is any value from the “no more than” list recited in the previous paragraph, e.g., 33 residues, as long as the bottom range value is less than the top range value. For example, a range of differing residues can be 2-8 residues. In some embodiments, the range of differing residues is 1-10, 1-9, 1-8, 1-7, 1-6, 1-5, 1-4, 1-3, 1-2, 2-10, 2-9, 2-8, 2-7, 2-6, 2-5, 2-4, 2-3, 3-10, 3-9, 3-8, 3-7, 3-6, 3-5, 3-4, 4-10, 4-9, 4-8, 4-7, 4-6, 4-5, 5-10, −5-9, 5-8, 5-7, 5-6, 6-10, 6-9, 6-8, 6-7, 7-10, 7-9, 7-8, 8-10, 8-9, 9-10, 0-10, 0-1, 0-2, 0-3, 0-4, 0-5, 0-6, 0-7, 0-8, 0-9, or 0-10.

[0039] In some immunogenic fragment embodiments of the invention, the intervening region is directly adjacent to one or both of the N-terminus and C-terminus regions, i.e., there are no amino acid residues between the amino acid sequences of the N-terminus region and the intervening region, there are no amino acid residues between the amino acid sequences of the C-terminus region and the intervening region, or there are no amino acid residues between either the amino acid sequences of the N-terminus region and the intervening region, or between the amino acid sequences of the C-terminus and the intervening region. In other embodiments, one or more amino acid residues are present between the amino acid sequences of the N-terminus region and the intervening region, between the amino acid sequences of the C-terminus and the intervening region, or both. When one or more amino acid residues are present, there can be, for instance, 1, 2, 3, 4, 5, 6, 7, 8, 9, 10, 11, 12, 13, 14, 15, 16, 17, 18, 19, 20, 21, 22, 23, 24, 25, 26, 27, 28, 29, 30, 31, 32, 33, 34 35, 36, 37, 38, 39, 40, 41, 42, 43, 44, 45, 46, 47, 48, 49, 50, or more amino acid residues present between an nearest residue of the N- or C-terminus region and the intervening region.

[0040] In some embodiments, the intervening region further comprises an N-terminus-adjacent region, a C-terminus-adjacent region, or both. Non-limiting examples of N-terminus-adjacent and C-terminus-adjacent regions are respectively shown in Tables 1 and 2 below. In some embodiments, as can be seen in Table 1, wherein the N-terminus region amino acid sequence is selected from the amino acid sequences of SEQ ID NOs: 611-668, in most cases there are one or more corresponding N-terminus-adjacent region amino acid sequences, as shown in the table below. In some embodiments, as can be seen in Table 2, wherein the C-terminus region amino acid sequence is selected from the amino acid sequences of SEQ ID NOs: 669-712, in most cases there are one or more corresponding C-terminus-adjacent region amino acid sequences as shown in the table below.

TABLE 1

| N-terminus Region | | Corresponding N-terminus- |
|---|---|---|
| | SEQ ID | adjacent region(s) |
| Name | NO: | SEQ ID NO(s) or AA sequence: |
| CTD-gN-5mer-end-d00 | 611 | 815 or 969 or 1001 or 1047 |
| CTD-gN-5mer-end-d01 | 612 | 816 or 970 or 1002 or 1048 |
| CTD-gN-5mer-end-d02 | 613 | 817 or 971 or 1003 or 1049 |
| CTD-gN-5mer-end-d03 | 614 | 818 or 972 or 1004 or 1050 |
| CTD-gN-5mer-end-d04 | 615 | 819 or 973 or 1005 or 1051 |
| CTD-gN-5mer-end-d05 | 616 | 820 or 974 or 1006 or 1052 |
| CTD-gN-5mer-end-d06 | 617 | 821 or 975 or 1007 or 1053 |
| CTD-gN-5mer-end-d07 | 618 | 822 or 976 or 1008 or 1054 |
| CTD-gN-5mer-end-d08 | 619 | 823 or 977 or 1009 or 1055 |
| CTD-gN-5mer-end-d09 | 620 | 824 or 978 or 1010 or 1056 |
| CTD-gN-5mer-end-d10 | 621 | 825 or 979 or 1011 or 1057 |
| CTD-gN-5mer-end-d11 | 622 | 826 or 980 or 1012 or 1058 |
| CTD-gN-5mer-end-d12 | 623 | 827 or 981 or 1013 or 1059 |
| CTD-gN-5mer-end-d13 | 624 | 828 or 982 or 1014 or 1060 |
| CTD-gN-5mer-end-d14 | 625 | 829 or 983 or 1015 or 1061 |
| CTD-gN-5mer-end-d15 | 626 | 830 or 984 or 1016 or 1062 |
| CTD-gN-5mer-end-d16 | 627 | 831 or 1017 |
| CTD-gN-5mer-end-d17 | 628 | 832 or 1018 |
| CTD-gN-5mer-end-d18 | 629 | 833 or 1019 |
| CTD-gN-5mer-end-d19 | 630 | 834 or 1020 |
| CTD-gN-5mer-end-d20 | 631 | 835 or 1021 |
| CTD-gN-5mer-end-d21 | 632 | 836 or 1022 |
| CTD-gN-5mer-end-d22 | 633 | 837 or 1023 |
| CTD-gN-5mer-end-d23 | 634 | 838 |
| CTD-gN-5mer-end-d24 | 635 | 839 |
| CTD-gN-5mer-end-d25 | 636 | 840 |
| CTD-gN-5mer-end-d26 | 637 | 841 |
| CTD-gN-5mer-end-d27 | 638 | 842 |
| CTD-gN-5mer-end-d28 | 639 | 843 |
| CTD-gN-5mer-end-d29 | 640 | 844 |
| CTD-gN-5mer-end-d30 | 641 | 845 |
| CTD-gN-5mer-end-d31 | 642 | 846 |
| CTD-gN-5mer-end-d32 | 643 | 847 |
| CTD-gN-5mer-end-d33 | 644 | 848 |
| CTD-gN-5mer-end-d34 | 645 | 849 |
| CTD-gN-5mer-end-d35 | 646 | 850 |
| CTD-gN-5mer-end-d36 | 647 | 851 |
| CTD-gN-5mer-end-d37 | 648 | 852 |
| CTD-gN-5mer-end-d38 | 649 | 853 |
| CTD-gN-5mer-end-d39 | 650 | 854 |
| CTD-gN-5mer-end-d40 | 651 | DYS |
| CTD-gN-5mer-end-d41 | 652 | YS |
| CTD-gN-5mer-end-d42 | 653 | S |
| CTD-gN-5mer-end-d43 | 654 | N/A |
| CTD-gN-5mer-end-d44 | 655 | N/A |
| CTD-gN-5mer-end-d45 | 656 | N/A |
| CTD-gN-5mer-end-d46 | 657 | N/A |
| CTD-gN-5mer-end-d47 | 658 | N/A |
| CTD-gN-5mer-end- | 659 | 831 or 1017 |
| d16_Om | | |
| CTD-gN-5mer-end- | 660 | 832 or 1018 |
| d17_Om | | |
| CTD-gN-5mer-end- | 661 | 833 or 1019 |
| d18_Om | | |
| CTD-gN-5mer-end- | 662 | 834 or 1020 |
| d19_Om | | |
| CTD-gN-5mer-end- | 663 | 835 or 1021 |
| d20_Om | | |
| CTD-gN-5mer-end- | 664 | 838 |
| d23_Mu | | |
| CTD-gN-5mer-end- | 665 | 839 |
| d24_Mu | | |
| CTD-gN-5mer-end- | 666 | 840 |
| d25_Mu | | |
| CTD-gN-5mer-end- | 667 | 841 |
| d26_Mu | | |
| CTD-gN-5mer-end- | 668 | 842 |
| d27_Mu | | |

TABLE 2

| C-terminus Region | | Corresponding C-terminus- |
|---|---|---|
| | SEQ ID | adjacent region(s) |
| Name | NO: | SEQ ID NO(s) or AA sequence: |
| CTD-gC-5mer-end-d00 | 669 | 901 or 1079 |
| CTD-gC-5mer-end-d01 | 670 | 902 or 1080 |
| CTD-gC-5mer-end-d02 | 671 | 903 or 1081 |
| CTD-gC-5mer-end-d03 | 672 | 904 or 1082 |
| CTD-gC-5mer-end-d04 | 673 | 905 or 1083 |
| CTD-gC-5mer-end-d05 | 674 | 906 or 1084 |
| CTD-gC-5mer-end-d06 | 675 | 907 or 1085 |
| CTD-gC-5mer-end-d07 | 676 | 908 or 1086 |
| CTD-gC-5mer-end-d08 | 677 | 909 or 1087 |
| CTD-gC-5mer-end-d09 | 678 | 910 or 1088 |
| CTD-gC-5mer-end-d10 | 679 | 911 or 1089 |
| CTD-gC-5mer-end-d11 | 680 | 912 or 1090 |
| CTD-gC-5mer-end-d12 | 681 | 913 or 1091 |
| CTD-gC-5mer-end-d13 | 682 | 914 or 1092 |
| CTD-gC-5mer-end-d14 | 683 | 915 or 1093 |
| CTD-gC-5mer-end-d15 | 684 | 916 or 1094 |
| CTD-gC-5mer-end-d16 | 685 | 917 or 1095 |
| CTD-gC-5mer-end-d17 | 686 | 918 |
| CTD-gC-5mer-end-d18 | 687 | 919 |
| CTD-gC-5mer-end-d19 | 688 | 920 |
| CTD-gC-5mer-end-d20 | 689 | 921 |
| CTD-gC-5mer-end-d21 | 690 | 922 |
| CTD-gC-5mer-end-d22 | 691 | 923 |
| CTD-gC-5mer-end-d23 | 692 | 924 |
| CTD-gC-5mer-end-d24 | 693 | 925 |
| CTD-gC-5mer-end-d25 | 694 | 926 |
| CTD-gC-5mer-end-d26 | 695 | 927 |
| CTD-gC-5mer-end-d27 | 696 | 928 |
| CTD-gC-5mer-end-d28 | 697 | 929 |
| CTD-gC-5mer-end-d29 | 698 | 930 |
| CTD-gC-5mer-end-d30 | 699 | 931 |
| CTD-gC-5mer-end-d31 | 700 | STN |
| CTD-gC-5mer-end-d32 | 701 | ST |
| CTD-gC-5mer-end-d33 | 702 | S |
| CTD-gC-5mer-end-d34 | 703 | N/A |
| CTD-gC-5mer-end-d35 | 704 | N/A |
| CTD-gC-5mer-end-d36 | 705 | N/A |
| CTD-gC-5mer-end-d37 | 706 | N/A |
| CTD-gC-5mer-end-d38 | 707 | N/A |
| CTD-gC-5mer-end- | 708 | 918 |
| d17_Om | | |
| CTD-gC-5mer-end- | 709 | 919 |
| d18_Om | | |
| CTD-gC-5mer-end- | 710 | 920 |
| d19_Om | | |
| CTD-gC-5mer-end- | 711 | 921 |
| d20_Om | | |
| CTD-gC-5mer-end- | 712 | 922 |
| d21_Om | | |

[0041] To be clear, an N-terminus-adjacent region is located at the C-terminal end of an N-terminus region, and a C-terminus-adjacent region is located at the N-terminal end of a C-terminus region. Accordingly, in some embodiments, an immunogenic fragment comprises, consists of, or consists essentially of an amino acid sequence that can be depicted as [an N-terminus region amino acid sequence]-[a corresponding N-terminus-adjacent amino acid sequence]-[an amino acid sequence selected from the group consisting of SEQ ID NOs: 603-606, 2037-2040, and 2045-2050]-[a corresponding C-terminus-adjacent amino acid sequence]-[a C-terminus amino acid sequence], wherein the intervening region comprises, consists of, or consists essentially of the amino acid sequence depicted by the bolded portion. In another embodiment, an immunogenic fragment comprises, consists of, or consists essentially of an amino acid sequence that can be depicted as [an N-terminus region amino acid sequence]-[a corresponding N-terminus-adjacent amino acid sequence]-[an amino acid sequence selected from the group consisting of SEQ ID NOs: 603-606, 2037-2040, and 2045-2050]-[a C-terminus amino acid sequence], wherein the intervening region comprises, consists of, or consists essentially of the amino acid sequence depicted by the bolded portion. In another embodiment, an immunogenic fragment comprises, consists of, or consists essentially of an amino acid sequence that can be depicted as [an N-terminus region amino acid sequence]-[an amino acid sequence selected from the group consisting of SEQ ID NOs: 603-606, 2037-2040, and 2045-2050]-[a corresponding C-terminus-adjacent amino acid sequence]-[a C-terminus amino acid sequence], wherein the intervening region comprises, consists of, or consists essentially of the amino acid sequence depicted by the bolded portion. For instance, an immunogenic fragment can comprise, consist of, or consist essentially of, an amino acid sequence comprising, consisting of, or consisting essentially of an N-terminus region of SEQ ID NO: 627, a corresponding N-terminus-adjacent region of SEQ ID NO: 831, an intervening region of SEQ ID NO: 606, a corresponding C-terminus-adjacent region of SEQ ID NO: 854, and a C-terminus region of SEQ ID NO: 650.

[0042] In some embodiments, an immunogenic fragment comprises, consists of, or consists essentially of [an N-terminus amino acid sequence selected from SEQ ID NOs: 611-624, preferably SEQ ID NOs: 611-614, 616-617, 621-627, or 622-624]-[an N-terminus-adjacent amino acid sequence selected from Table 1 that corresponds to the selected N-terminus amino acid sequence]-[an amino acid sequence selected from the group consisting of SEQ ID NOs: 603-606, 2037-2040, and 2045-2050]-[a C-terminus-adjacent amino acid sequence selected from Table 2 that corresponds to the selected N-terminus amino acid sequence]-[a C-terminus amino acid sequence selected from SEQ ID NOs: 688-703 and 710-712, preferably SEQ ID NOs: 688-693, 694-699, 700-703, 691-696, or 697-701], wherein the intervening region comprises, consists of, or consists essentially of the amino acid sequence depicted by the bolded portion.

[0043] In some embodiments, there are no amino acid residues between the N-terminus-adjacent region amino acid sequence and the N-terminus region, between the N-terminus-adjacent region amino acid sequence and the amino acid sequence selected from the group consisting of SEQ ID NOs: 603-606, 2037-2040, and 2045-2050, or both, i.e., the sequences directly abut each other.

[0044] In some embodiments, there are no additional amino acid residues between the C-terminus-adjacent region amino acid sequence and the C-terminus region, between the C-terminus-adjacent region amino acid sequence and the amino acid sequence selected from the group consisting of SEQ ID NOs: 603-606, 2037-2040, and 2045-2050, or both, i.e., the sequences directly abut each other.

[0045] In some embodiments, an immunogenic fragment comprises an N-terminus region and a C-terminus region, wherein the N-terminus region comprises, consists of, or consists essentially of an amino acid sequence of at least five, at least six, at least seven, at least eight, at least nine, at least 10, at least 11, at least 12, at least 13, at least 14, or at least 15 contiguous amino acid residues of an amino acid sequence of SEQ ID NO: 245, 293, 314, or 342. In some embodiments, an immunogenic fragment comprises an N-terminus region and a C-terminus region, wherein the C-terminus region comprises, consists of, or consists essentially of an amino acid sequence of at least five, at least six, at least seven, at least eight, at least nine, at least 10, at least 11, at least 12, at least 13, at least 14, or at least 15 contiguous amino acid residues of an amino acid sequence of SEQ ID NO: 363 or 402.

[0046] When an N-terminus region comprises, consists of, or consists essentially of a number of contiguous amino acid residues of an amino acid sequence of SEQ ID NO: 245, 293, 314, or 342, there is at least one corresponding N-terminus-adjacent region amino acid sequence in nearly all cases. Accordingly, in some embodiments, a corresponding N-terminus-adjacent region amino acid sequence can comprise, consist of, or consist essentially of the portion of the amino acid sequence of SEQ ID NO: 245, 293, 314, or 342 that is “downstream” of the contiguous amino acid residues of the N-terminus region, i.e., the portion of the amino acid sequence of SEQ ID NO: 245, 293, 314, or 342 that begins directly after the C-terminal most residue of the contiguous amino acid residues and ends at the C-terminal end of SEQ ID NO: 245, 293, 314, or 342. The only cases in which there is no corresponding N-terminus adjacent region amino acid sequence is when the C-terminal most residue of the contiguous amino acid residues is also the C-terminal most residue of SEQ ID NO: 245, 293, 314, or 342. For example, when the N-terminus region comprises, consists of, or consists essentially of the first 12 contiguous amino acid residues of amino acid sequence SEQ ID NO: 245, then a corresponding N-terminus-adjacent region amino acid sequence comprises, consists of, or consists essentially of all amino acid residues of SEQ ID NO: 245 that are downstream of the 12 contiguous amino acid residues of the N-terminus region.

[0047] Similarly, when a C-terminus region comprises, consists of, or consists essentially of such contiguous amino acid residues of an amino acid sequence of SEQ ID NO: 363 or 402, there is at least one corresponding C-terminus-adjacent region amino acid sequence in nearly all cases. Accordingly, in some embodiments, a corresponding C-terminus-adjacent region amino acid sequence can comprise, consist of, or consist essentially of the portion of the amino acid sequence of SEQ ID NO: 363 or 402 that is “upstream” of the contiguous amino acid residues of the C-terminus region, i.e., the portion of the amino acid sequence of SEQ ID NO: 363 or 402 that begins directly before the N-terminal most residue of the contiguous amino acid residues and ends at the N-terminal end of SEQ ID NO: 363 or 402. The only cases in which there is no corresponding C-terminus adjacent region amino acid sequence is when the N-terminal most residue of the contiguous amino acid residues is also the N-terminal most residue of SEQ ID NO: 363 or 402. For example, when the C-terminus region comprises, consists of, or consists essentially of the last 9 contiguous amino acid residues of amino acid sequence SEQ ID NO: 363, then a corresponding C-terminus-adjacent region amino acid sequence comprises, consists of, or consists essentially of all amino acid residues of SEQ ID NO: 363 that are upstream of the 9 contiguous amino acid residues of the C-terminus region.

[0048] In some embodiments, an immunogenic fragment further comprises both a corresponding N-terminus-adjacent region, and a corresponding C-terminus-adjacent region, wherein each is as described herein.

[0049] In embodiments wherein the intervening region further comprises a corresponding N-terminus-adjacent region, a corresponding C-terminus-adjacent region, or both, the percent identity calculation is based off the amino acid sequence of the entire intervening region amino acid sequence, i.e., the amino acid sequence of the corresponding N-terminal-adjacent region and/or the amino acid sequence of the corresponding C-terminal-adjacent region, combined in the appropriate orientation with the other amino acid sequence(s) of which the intervening region comprises, consists, or consists essentially.

[0050] Similarly, in embodiments wherein the intervening region further comprises a corresponding N-terminus-adjacent region, a corresponding C-terminus-adjacent region, or both, the calculation of the number of differing amino acid residues is based off the amino acid sequence of the entire intervening region amino acid sequence, i.e., the amino acid sequence of the N-terminal-adjacent region and/or the amino acid sequence of the C-terminal-adjacent region, combined in the appropriate orientation with the other amino acid sequence(s) of which the intervening region comprises, consists, or consists essentially.

[0051] In some embodiments, the intervening region comprises, consists of, consists essentially of an amino acid sequence selected from the group consisting of SEQ ID NOs: 603-606, 2037-2040, and 2045-2050, and optionally a corresponding N-terminus-adjacent region sequence, and/or a corresponding C-terminus-adjacent region sequence, wherein the intervening region amino acid sequence further includes 0 mutations or at least one, at least two, at least three, at least four, at least five, at least six, at least seven, at least eight, at least nine, or at least 10, at least 11, at least 12, at least 13, at least 14, or at least 15 mutations at the following positions of the amino acid sequence, wherein the positions are relative to the first residue of the amino acid sequence selected from the group consisting of SEQ ID NOs: 603-606, 2037-2040, and 2045-2050: −28, −21, 3, 5, 7, 49, 72, 78, 84, 109, 110, 116, 125, 128, 130, 133, 137, and 179. A negative number denotes that the position is upstream (i.e., toward the N-terminal end) of the first residue of the amino acid sequence selected from the group consisting of SEQ ID NOs: 603-606, 2037-2040, and 2045-2050, whereas a positive number denotes that the position is downstream (i.e., toward the C-terminal end) of the first residue.

[0052] In some embodiments, the intervening region comprises, consists of, consists essentially of an amino acid sequence selected from the group consisting of SEQ ID NOs: 603-606, 2037-2040, and 2045-2050, and optionally an N-terminus-adjacent region sequence, and/or a C-terminus-adjacent region sequence, wherein the intervening region amino acid sequence further includes no more than one, no more than two, no more than three, no more than four, no more than five, no more than six, no more than seven, no more than eight, no more than nine, or no more than 10, no more than 11, no more than 12, no more than 13, no more than 14, no more than 15, no more than 16, or no more than 17 mutations at the following positions of the amino acid sequence, wherein the positions are relative to the first residue of the amino acid sequence selected from the group consisting of SEQ ID NOs: 603-606, 2037-2040, and 2045-2050: −28, −21, 3, 5, 7, 49, 72, 78, 84, 109, 110, 116, 125, 128, 130, 133, 137, and 179. In further embodiments, the intervening region comprises, consists of, consists essentially of an amino acid sequence selected from the group consisting of SEQ ID NOs: 603-606, 2037-2040, and 2045-2050, and optionally an N-terminus-adjacent region sequence, and/or a C-terminus-adjacent region sequence, wherein the intervening region amino acid sequence further includes a range of the quantity of mutations, wherein the lower limit is any value from the “at least” list in the previous paragraph and the upper limit is any value from the “no more than” list in this paragraph, so long as the lower limit value is less than the upper limit value. For example, the range of the quantity of mutations can be 1-5, 1-4, 1-3, 1-2, 2-5, 2-4, 2-3, 3-5, 3-4, 4-5, 0-5, 0-4, 0-3, 0-2, and 0-1.

[0053] In an embodiment, the one or more mutations are L84R and T110K. In another embodiment, the one or more mutations are K49N, L84R, and T110K. In another embodiment, the one or more mutations are R(−)21K, E116K, and N133Y. In another embodiment, the one or more mutations are R(−)21K, T110R, and E116K. In another embodiment, the one or more mutations are R(−)21K, K49N, L84R, 478K, E116K, and N133Y. In another embodiment, the one or more mutations are R(−)21K, K49N, L84R, T110R, E116K, and N133Y. In another embodiment, the one or more mutations are G(−)28D, S3L, S5P, S7F, K49N, N72K, G78S, S109N, T110K, E116A, Q125K, G128S, Q130R, N133Y, and Y137H. In another embodiment, the one or more mutations are G(−)28D, S3L, S5P, S7F, K49N, N72K, G78S, S109N, T110K, E116A, Q125R, G128S, Q130R, N133Y, and Y137H. In another embodiment, the one or more mutations are G(−)28D, R(−)21K, S3L, S5P, S7F, K49N, N72K, G78S, L84R, S109N, T110K, E116K, Q125R, G128S, Q130R, N133Y, and Y137H. In another embodiment, the one or more mutations are G(−)28D, R(−)21K, S3L, S5P, S7F, K49N, N72K, G78S, L84R, S109N, T110K, E116A, Q125R, G128S, Q130R, N133Y, and Y137H. In another embodiment, the one or more mutations are G(−)28D, R(−)21K, S3L, S5P, S7F, K49N, N72K, G78S, L84R, S109N, T110R, E116A, Q125R, G128S, Q130R, N133Y, and Y137H. In another embodiment, the one or more mutations are G(−)28D, R(−)21K, S3L, S5P, S7F, K49N, N72K, G78S, L84R, S109N, T110R, E116K, Q125R, G128S, Q130R, N133Y, and Y137H. In another embodiment, the one or more mutations are G(−)28D, R(−)21K, S3L, S5P, S7F, K49N, N72K, G78S, L84R, S109N, T110R, E116K, Q125R, G128S, Q130R, N133Y, Y137H, and T179K.

[0054] In certain embodiments, an immunogenic fragment does not comprise, consist of, or consist essentially of one or more particular amino acid sequences. For instance, in some embodiments, an immunogenic fragment does not comprise, consist of, or consist essentially of an amino sequence selected from the group consisting of SEQ ID NOs: 1, 3, 5, 7, 9, 11, 13, 15, 17, 19, 21, 23, 25, 27, 29, 31, 33, 35, 37, 39, 41, 43, 45, 47, 49, 51, 53, 55, 57, 59, 61, 63, 171, 173, 175, 177, 179, 181, 183, 185, 187, 189, 191, 199, 201, 203, 205, 207, 209, 211, 213, 215, and 2057-2066, or any combination thereof.

[0055] In certain embodiments, a polynucleotide encoding an immunogenic fragment does not comprise, consist of, or consist essentially of one or more particular nucleotide sequences. For instance, in some embodiments, a polynucleotide encoding an immunogenic fragment does not comprise, consist of, or consist essentially of a nucleotide sequence selected from the group consisting of SEQ ID NOs: 2, 4, 6, 8, 10, 12, 14, 16, 18, 20, 22, 24, 26, 28, 30, 32, 34, 36, 38, 40, 42, 44, 46, 48, 50, 52, 54, 56, 58, 60, 62, 64, 172, 174, 176, 178, 180, 182, 184, 186, 188, 190, 192, 200, 202, 204, 206, 208, 210, 212, 214, 216, and 2067-2076, or any combination thereof.

[0056] In some embodiments, an immunogenic fragment does not comprise an intervening region comprising, consisting of, or consisting essentially of an amino acid sequence selected from the group consisting of SEQ ID NOs: 603-606, 2037-2040, and 2045-2050, and optionally an N-terminus-adjacent region sequence, and/or a C-terminus-adjacent region sequence, wherein the intervening region amino acid sequence further comprises one or more of the following amino acid substitutions, wherein the positions are relative to the first residue of the amino acid sequence selected from the group consisting of SEQ ID NOs: 603-606, 2037-2040, and 2045-2050: G(−)28D, R(−)21K, S3L, S5P, S7F, K49N, K49T, N72K, G78S, L84R, S109N, T110K, E116K, E116Q, E116A, Q125R, Q128S, Q130R, N133Y, Y137H, and T179K. In one embodiment, the one or more amino acid substitutions is L84R. In another embodiment, the one or more amino acid substitutions is E116K. In a further embodiment, the one or more amino acid substitutions are K49N, E116K, and N133Y. In yet another embodiment, the one or more amino acid substitutions are K49T, E116K, and N133Y. In another embodiment, the one or more amino acid substitutions are K49T, L84R, E116K, and N133Y. In another embodiment, the one or more amino acid substitutions and/or deletions are L84R; or E116K; or K49N, E116K, and N133Y; or K49T, E116K, and N133Y; or K49T, L84R, E116K, and N133Y.

[0057] In some embodiments, an immunogenic fragment comprises, consists of, consists essentially of an amino acid sequence with at least 60%, at least 61%, at least 62%, at least 63%, at least 64%, at least 65%, at least 66%, at least 67%, at least 68%, at least 69%, at least 70%, at least 71%, at least 72%, at least 73%, at least 74%, at least 75%, at least 76%, at least 77%, at least 78%, at least 79%, at least 80%, at least 81%, at least 82%, at least 83%, at least 84%, at least 85%, at least 86%, at least 87%, at least 88%, at least 89%, at least 90%, at least 91%, at least 92%, at least 93%, at least 94%, at least 95%, at least 96%, at least 97%, at least 98%, or at least 99% identity to an amino acid sequence selected from the group consisting of SEQ ID NOs: 1577-1661, and 1917-1946, preferably SEQ ID NOs: 1924, 1925, 1928, 1939, 1940, and 1943. In an embodiment, an immunogenic fragment comprises, consists of, consists essentially of an amino acid sequence at least 95%, at least 96%, at least 97%, at least 98%, or at least 99% identity to an amino acid sequence selected from the group consisting of SEQ ID NOs: 1577-1661, and 1917-1946. In some embodiments, an immunogenic fragment comprises, consists of, or consists essentially of, an amino acid sequence with no more than 70%, no more than 71%, no more than 72%, no more than 73%, no more than 74%, no more than 75%, no more than 76%, no more than 77%, no more than 78%, no more than 79%, no more than 80%, no more than 81%, no more than 82%, no more than 83%, no more than 84%, no more than 85%, no more than 86%, no more than 87%, no more than 88%, no more than 89%, no more than 90%, no more than 91%, no more than 92%, no more than 93%, no more than 94%, no more than 95%, no more than 96%, no more than 97%, no more than 98%, or no more than 99% identity to an amino acid sequence selected from the group consisting of SEQ ID NOs: 1577-1661 and 1917-1946, preferably SEQ ID NOs: 1924, 1925, 1928, 1939, 1940, and 1943. In an embodiment, an immunogenic fragment comprises, consists of, consists essentially of an amino acid sequence no more than 95%, no more than 96%, no more than 97%, no more than 98%, or no more than 99% identity to an amino acid sequence selected from the group consisting of SEQ ID NOs: 1577-1661 and 1917-1946, preferably SEQ ID NOs: 1924, 1925, 1928, 1939, 1940, and 1943.

[0058] In some embodiments, an immunogenic fragment comprises, consists of, or consists essentially of, an amino acid sequence with a range of percent identity to an amino acid sequence selected from the group consisting of SEQ ID NOs: 1577-1661 and 1917-1946, preferably SEQ ID NOs: 1924, 1925, 1928, 1939, 1940, and 1943, wherein the percent identity value of the bottom of the range is any value from the “at least” list of values recited in the previous paragraph, e.g., 87%, and the percent identity value for the top of the range is any value from “no more than” list recited in the previous paragraph, e.g., 96%, as long as the bottom range value is less than the top range value. For example, a range of percent identity can be between 87% and 94% identity. In some embodiments, the range of percent identity is 90-99, 90-98, 90-97, 90-96, 90-95, 90-94, 90-93, 90-92, 90-91, 91-99, 91-98, 91-97, 91-96, 91-95, 91-94, 91-93, 91-92, 92-99, 92-98, 92-97, 92-96, 92-95, 92-94, 92-93, 93-99, 93-98, 93-97, 93-96, 93-95, 93-94, 94-99, 94-98, 94-97, 94-96, 94-95, 95-99, 95-98, 95-97, 95-96, 96-99, 96-98, 96-97, 97-99, 97-98, or 98-99.

[0059] In some embodiments, an immunogenic fragment comprises, consists of, or consists essentially of, an amino acid sequence that differs at 0, 1, 2, 3, 4, 5, 6, 7, 8, 9, 10, 11, 12, 13, 14, 15, 16, 17, 18, 19, 20, 21, 22, 23, 24, 25, 26, 27, 28, 29, 30, 31, 32, 33, 34, 35, 36, 37, 38, 39, 40, 41, 42, 43, 44, 45, 46, 47, 48, 49, or 50 residues from the amino acid sequence of an amino acid sequence selected from the group consisting of SEQ ID NOs: 1577-1661 and 1917-1946, preferably SEQ ID NOs: 1924, 1925, 1928, 1939, 1940, and 1943. In some embodiments, the number of differing amino acid residues is 0, 1, 2, 3, 4, 5, 6, 7, 8, 9, 10, 11, 12, 13, 14, 15, 16, 17, 18, 19, or 20.

[0060] In some embodiments, an immunogenic fragment comprises, consists of, or consists essentially of, an amino acid sequence that differs at no residues or at least 1, at least 2, at least 3, at least 4, at least 5, at least 6, at least 7, at least 8, at least 9, at least 10, at least 11, at least 12, at least 13, at least 14, at least 15, at least 16, at least 17, at least 18, at least 19, at least 20, at least 21, at least 22, at least 23, at least 24, at least 25, at least 26, at least 27, at least 28, at least 29, at least 30, at least 31, at least 32, at least 33, at least 34, at least 35, at least 36, at least 37, at least 38, at least 39, at least 40, at least 41, at least 42, at least 43, at least 44, at least 45, at least 46, at least 47, at least 48, at least 49, or at least 50 residues from the amino acid sequence of an amino acid sequence selected from the group consisting of SEQ ID NOs: 1577-1661 and 1917-1946, preferably SEQ ID NOs: 1924, 1925, 1928, 1939, 1940, and 1943. In some embodiments, the number of differing amino acid residues is 0, at least 1, at least 2, at least 3, at least 4, at least 5, at least 6, at least 7, at least 8, at least 9, at least 10, at least 11, at least 12, at least 13, at least 14, at least 15, at least 16, at least 17, at least 18, at least 19, or at least 20. In some embodiments, the immunogenic fragment comprises, consists of, or consists essentially of, an amino acid sequence that differs from an amino acid sequence selected from the group consisting of SEQ ID NOs: 1577-1661 and 1917-1946, preferably SEQ ID NOs: 1924, 1925, 1928, 1939, 1940, and 1943, at no more than 1, no more than 2, no more than 3, no more than 4, no more than 5, no more than 6, no more than 7, no more than 8, no more than 9, no more than 10, no more than 11, no more than 12, no more than 13, no more than 14, no more than 15, no more than 16, no more than 17, no more than 18, no more than 19, no more than 20, no more than 21, no more than 22, no more than 23, no more than 24, no more than 25, no more than 26, no more than 27, no more than 28, no more than 29, no more than 30, no more than 31, no more than 32, no more than 33, no more than 34, no more than 35, no more than 36, no more than 37, no more than 38, no more than 39, no more than 40, no more than 41, no more than 42, no more than 43, no more than 44, no more than 45, no more than 46, no more than 47, no more than 48, no more than 49, or no more than 50 residues. In some embodiments, the number of differing amino acid residues is no more than 1, no more than 2, no more than 3, no more than 4, no more than 5, no more than 6, no more than 7, no more than 8, no more than 9, no more than 10, no more than 11, no more than 12, no more than 13, no more than 14, no more than 15, no more than 16, no more than 17, no more than 18, no more than 19, or no more than 20.

[0061] In some embodiments, the immunogenic fragment comprises, consists of, or consists essentially of, an amino acid sequence with a range of residues at which the sequence differs from an amino acid sequence selected from the group consisting of SEQ ID NOs: 1577-1661 and 1917-1946, preferably SEQ ID NOs: 1924, 1925, 1928, 1939, 1940, and 1943, wherein the minimum number of differing residues is any value from the “at least” list recited in the previous paragraph, e.g., 4 residues, and the maximum number of differing residues is any value from the “no more than” list recited in the previous paragraph, e.g., 33 residues, as long as the bottom range value is less than the top range value. For example, a range of differing residues can be between 3 and 9 residues. In some embodiments, the range of differing residues is 1-10, 1-9, 1-8, 1-7, 1-6, 1-5, 1-4, 1-3, 1-2, 2-10, 2-9, 2-8, 2-7, 2-6, 2-5, 2-4, 2-3, 3-10, 3-9, 3-8, 3-7, 3-6, 3-5, 3-4, 4-10, 4-9, 4-8, 4-7, 4-6, 4-5, 5-10, −5-9, 5-8, 5-7, 5-6, 6-10, 6-9, 6-8, 6-7, 7-10, 7-9, 7-8, 8-10, 8-9, 9-10, 0-10, 0-1, 0-2, 0-3, 0-4, 0-5, 0-6, 0-7, 0-8, 0-9, or 0-10.

[0062] Without being bound to theory, the fragments of the SARS-CoV-2 glycoprotein described herein are each considered to be immunogenic, although the magnitude of the immunogenic response can vary upon a number of factors. Immunogenicity can be measured by any suitable method, including, but not limited to, vaccination of a test subject with a suitable dosage of a vaccine composition containing one or more immunogenic fragments, followed by analysis of antibody titers after certain periods of time, e.g., after 14 days, and/or after 28 days. Antibody analysis can be by any suitable method, including ELISA analysis. Test subjects can be any suitable subject, including mammals, such as primates, e.g., rhesus macaques, camelids (e.g., camel, llama, alpaca, dromedary and guanaco), rodents, e.g., mice and rats, and humans. Dosage can be any suitable dosage, including 12.5 ug, 25 ug, or 50 ug. Factors that influence immunogenic response include, but are not limited to, other components of the vaccine composition, e.g., adjuvants, the dosage and/or frequency at which the vaccine composition is administered, the type of subject, and the period of time between administration of the vaccine composition and subsequent measurement of the antibody titer.

[0063] In some embodiments, the immunogenic fragment is encoded by a recombinant polynucleotide. The recombinant polynucleotide can be any suitable polynucleotide. In some embodiments, the nucleotide sequence of the polynucleotide is codon optimized and/or codon pair optimized. In some embodiments, the recombinant polynucleotide encoding an immunogenic fragment is encoded by a nucleotide sequence that comprises, consists of, or consists essentially of a nucleotide sequence with at least 90%, preferably at least 91%, 92%, 93%, 94%, 95%, 96%, 97%, 98%, or 99%, sequence identity to a nucleotide sequence selected from the group consisting of nucleotide sequence selected from the group consisting of SEQ ID NOs: SEQ ID NOs: 1747-1831 and 1977-2006. In some embodiments, the recombinant polynucleotide encoding an immunogenic fragment is encoded by a nucleotide sequence that comprises, consists of, or consists essentially of a nucleotide sequence selected from the group consisting of SEQ ID NOs: 1747-1831 and 1977-2006.

[0064] Nucleotide or amino acid sequence “identity,” as referenced herein, can be determined by comparing a nucleotide or amino acid sequence of interest to a reference nucleotide or amino acid sequence. The percent identity is the number of nucleotides or amino acid residues that are the same (i.e., that are identical) as between the optimally aligned sequence of interest and the reference sequence divided by the length of the longest sequence (i.e., the length of either the sequence of interest or the reference sequence, whichever is longer). Alignment of sequences and calculation of percent identity can be performed using available software programs. Examples of such programs include CLUSTAL-W, T-Coffee, and ALIGN (for alignment of nucleic acid and amino acid sequences), BLAST programs (e.g., BLAST 2.1, BL2SEQ, BLASTp, BLASTn, and the like) and FASTA programs (e.g., FASTA3x, FASTM, and SSEARCH) (for sequence alignment and sequence similarity searches). Sequence alignment algorithms also are disclosed in, for example, Altschul et al., J. Molecular Biol., 215(3): 403-410 (1990), Beigert et al., Proc. Natl. Acad. Sci. USA, 106(10): 3770-3775 (2009), Durbin et al., eds., Biological Sequence Analysis: Probalistic Models of Proteins and Nucleic Acids, Cambridge University Press, Cambridge, UK (2009), Soding, Bioinformatics, 21(7): 951-960 (2005), Altschul et al., Nucleic Acids Res., 25(17): 3389-3402 (1997), and Gusfield, Algorithms on Strings, Trees and Sequences, Cambridge University Press, Cambridge UK (1997)). Percent (%) identity of sequences can be also calculated, for example, as 100×[(identical positions)/min(TG_{A}, TG_{B})], where TG_{A} and TG_{B} are the sum of the number of residues and internal gap positions in peptide sequences A and B in the alignment that minimizes TG_{A} and TG_{B}. See, e.g., Russell et al., J. Mol Biol., 244: 332-350 (1994).

[0065] Calculation of the number of residues at which two amino acid or nucleotide sequences differ, as referenced herein, can be determined in a similar fashion, i.e., by comparing a nucleotide or amino acid sequence of interest to a reference nucleotide or amino acid sequence. In contrast to the calculation of percent identity, in which the number of nucleotides or amino acid residues that are the same (i.e., that are identical) as between the optimally aligned sequence of interest and the reference sequence is divided by the length of the longest sequence (i.e., the length of either the sequence of interest or the reference sequence, whichever is longer), the calculation is simply summation of the number of nucleotides or amino acid residues that are not the same (i.e., that are not identical) as between the optimally aligned sequence of interest and the reference sequence. As before, alignment of sequences and calculation of percent identity can be performed using available software programs. Examples of such programs include CLUSTAL-W, T-Coffee, and ALIGN (for alignment of nucleic acid and amino acid sequences), BLAST programs (e.g., BLAST 2.1, BL2SEQ, BLASTp, BLASTn, and the like) and FASTA programs (e.g., FASTA3x, FASTM, and SSEARCH) (for sequence alignment and sequence similarity searches). Sequence alignment algorithms also are disclosed in, for example, Altschul et al., J. Molecular Biol., 215(3): 403-410 (1990), Beigert et al., Proc. Natl. Acad. Sci. USA, 106(10): 3770-3775 (2009), Durbin et al., eds., Biological Sequence Analysis: Probalistic Models of Proteins and Nucleic Acids, Cambridge University Press, Cambridge, UK (2009), Soding, Bioinformatics, 21(7): 951-960 (2005), Altschul et al., Nucleic Acids Res., 25(17): 3389-3402 (1997), and Gusfield, Algorithms on Strings, Trees and Sequences, Cambridge University Press, Cambridge UK (1997)).

### Description of Polypeptides Including at Least One Immunogenic Fragment

[0066] Polypeptides of the invention include any suitable immunogenic fragment or combination of such fragments, such as those described herein. In some embodiments, the polypeptides are recombinant and/or isolated. Accordingly, recombinant polypeptides of the invention include at least one immunogenic fragment. Unless otherwise indicated, each immunogenic fragment embodiment described herein can be combined together in any order and in any reasonable quantity within a recombinant polypeptide. In some embodiments, the recombinant polypeptide comprises, consists of, or consist essentially of at least one, at least two, at least three, at least four, at least five, at least six, at least seven, at least eight, at least nine, at least 10, at least 11, at least 12, at least 13, at least 14 or at least 15 immunogenic fragments. In some embodiments, the recombinant polypeptide comprises, consists of, or consist essentially of, no more than one, no more than two, no more than three, no more than four, no more than five, no more than six, no more than seven, no more than eight, no more than nine, no more than 10, no more than 11, no more than 12, no more than 13, no more than 14 or no more than 15 immunogenic fragments.

[0067] In some embodiments, the recombinant polypeptide comprises, consists of, or consist essentially of a range of quantity of immunogenic fragments, wherein the minimum number of immunogenic fragments is any value from the “at least” list recited in the previous paragraph, e.g., 4 immunogenic fragments, and the maximum number of immunogenic fragments is any value from the “no more than” list recited in the previous paragraph, e.g., 6 immunogenic fragments, as long as the bottom range value is less than the top range value. For example, a range of immunogenic fragments can be between 1 and 4 immunogenic fragments. In some embodiments, a recombinant polypeptide comprises, consists of, or consist essentially of 1-5, 1-4, 1-3, 1-2, 2-5, 2-4, 2-3, 3-5, 3-4, or 4-5 immunogenic fragments.

[0068] In some embodiments, a recombinant polypeptide comprises, consists of, or consists essentially of, one, two, three, four, five, six, seven, eight, nine, ten, eleven, twelve, thirteen, fourteen, or fifteen immunogenic fragments. In an embodiment, a recombinant polypeptide comprises, consists of, or consists essentially of one, two, or three immunogenic fragments. In an embodiment, a recombinant polypeptide comprises, consists of, or consists essentially of one or two immunogenic fragments.

[0069] (In some embodiments, the recombinant polypeptide comprises, consists of, or consists essentially of, a plurality of identical immunogenic fragments. For example, a recombinant polypeptide can include two, three, four, five, six, seven, eight, nine, ten, or more immunogenic fragments, wherein each fragment comprises, consists of, or consists essentially of the same amino acid sequence. In some embodiments, the recombinant polypeptide includes two, three, four or five identical immunogenic fragments. In yet further embodiments, the recombinant polypeptide comprises, consists of, or consists essentially of two or three identical immunogenic fragments. In another embodiment, the recombinant polypeptide comprises, consists of, or consists essentially of two identical immunogenic fragments.

[0070] In some embodiments, the recombinant polypeptide includes a plurality of non-identical immunogenic fragments. For example, a recombinant polypeptide can include two, three, four, five, six, seven, eight, nine, ten, or more immunogenic fragments, wherein each fragment comprises, consists of, or consists essentially of a different amino acid sequence from each other fragment, i.e., each fragment is a different fragment. In some embodiments, the recombinant polypeptide comprises, consists of, or consists essentially of two, three, four or five different immunogenic fragments. In yet another embodiment, the recombinant polypeptide comprises, consists of, or consists essentially of two or three different immunogenic fragments. In another embodiment, the recombinant polypeptide comprises, consists of, or consists essentially of two different immunogenic fragments.

[0071] In some embodiments, the recombinant polypeptide includes a plurality of immunogenic fragments, in which some of the fragments are identical, but not all. For example, a recombinant polypeptide can include two, three, four, five, six, seven, eight, nine, ten, or more immunogenic fragments, wherein each fragment comprises, consists of, or consists essentially of the same amino acid sequence, while also including one, two, three, four, five, six, seven, eight, nine, ten, or more immunogenic fragments, wherein each fragment comprises, consists of, or consists essentially of a different amino acid sequence from each other fragment. In some embodiments, the recombinant polypeptide comprises, consists of, or consists essentially of a total of two, three, four or five immunogenic fragments. In yet further embodiments, the recombinant polypeptide comprises, consists of, or consists essentially of a total of two or three immunogenic fragments, wherein at least one immunogenic fragment is different from the other immunogenic fragments within the polypeptide.

[0072] In some embodiments, the recombinant polypeptide comprises, consists of, or consists essentially of at least two immunogenic fragments of SARS-CoV-2 spike glycoprotein, wherein the at least two immunogenic fragments each comprise an N-terminus region, wherein the N-terminus region of each fragment comprises an amino acid sequence independently selected from the group consisting of SEQ ID NOs: 245-289 and 293-362, and amino acid sequences DYS, YS, and S, preferably selected from SEQ ID NOs: 245-248, 250-251, 255-261, 256-258, 293-296, 298-299, 303-309, 304-306, 314-317, 319-320, 324-330, 325-327, 342-345, 347-348, 352-358, and 353-355. In some embodiments, the recombinant polypeptide comprises, consists of, or consists essentially of at least two immunogenic fragments of SARS-CoV-2 spike glycoprotein, wherein the at least two immunogenic fragments each comprise N-terminus and C-terminus regions, wherein the N-terminus region of each fragment comprises an amino acid sequence independently selected from the group consisting of SEQ ID NOs: 245-289 and 293-362, and amino acid sequences DYS, YS, and S, preferably selected from SEQ ID NOs: 245-248, 250-251, 255-261, 256-258, 293-296, 298-299, 303-309, 304-306, 314-317, 319-320, 324-330, 325-327, 342-345, 347-348, 352-358, and 353-355, and wherein the C-terminus region comprises, consists of, or consists essentially of an amino acid sequence selected from the group consisting of SEQ ID NOs: 363-398 and 402-423, and amino acid sequences STN, ST, and S, preferably selected from SEQ ID NOs: 382-397, 382-387, 388-393, 394-397, 385-390, 391-395, and 421-423. In some embodiments, the recombinant polypeptide comprises, consists of, or consists essentially of at least two immunogenic fragments of SARS-CoV-2 spike glycoprotein, wherein the at least two immunogenic fragments each comprise an N-terminus region and a C-terminus region, wherein the N-terminus region of each immunogenic fragment comprises, consists of, or consists essentially of an amino acid sequence that differs at a total of 1, 2, 3, 4, 5, 6, 7, 8, 9, 10, 11, 12, 13, 14, or 15 residues from an amino acid sequence selected from the group consisting of SEQ ID NOs: 245-289 and 293-362, and amino acid sequences DYS, YS, and S, preferably selected from SEQ ID NOs: 245-248, 250-251, 255-261, 256-258, 293-296, 298-299, 303-309, 304-306, 314-317, 319-320, 324-330, 325-327, 342-345, 347-348, 352-358, and 353-355, and wherein the C-terminus region of each immunogenic fragment comprises, consists of, or consists essentially of an amino acid sequence that differs at a total of 1, 2, 3, 4, 5, 6, 7, 8, 9, 10, 11, 12, 13, 14, or 15 residues from an amino acid sequence selected from the group consisting of SEQ ID NOs: 363-398 and 402-423, and amino acid sequences STN, ST, and S, preferably selected from SEQ ID NOs: 382-397, 382-387, 388-393, 394-397, 385-390, 391-395, and 421-423. In some embodiments, the recombinant polypeptide comprises, consists of, or consists essentially of at least two immunogenic fragments of SARS-CoV-2 spike glycoprotein, wherein the at least two immunogenic fragments each comprise an N-terminus region, an intervening region, and a C-terminus region, wherein the N-terminus region of each immunogenic fragment comprises, consists of, or consists essentially of an amino acid sequence that differs at a total of 1, 2, 3, 4, 5, 6, 7, 8, 9, 10, 11, 12, 13, 14, or 15 residues from an amino acid sequence selected from the group consisting of SEQ ID NOs: 245-289 and 293-362, and amino acid sequences DYS, YS, and S, preferably selected from SEQ ID NOs: 245-248, 250-251, 255-261, 256-258, 293-296, 298-299, 303-309, 304-306, 314-317, 319-320, 324-330, 325-327, 342-345, 347-348, 352-358, and 353-355, and wherein the C-terminus region of each immunogenic fragment comprises, consists of, or consists essentially of an amino acid sequence that differs at a total of 1, 2, 3, 4, 5, 6, 7, 8, 9, 10, 11, 12, 13, 14, or 15 residues from an amino acid sequence selected from the group consisting of SEQ ID NOs: 363-398 and 402-423, and amino acid sequences STN, ST, and S, preferably selected from SEQ ID NOs: 382-397, 382-387, 388-393, 394-397, 385-390, 391-395, and 421-423, and wherein the intervening region comprises, consists of, or consists essentially of, an amino acid sequence that differs at 1, 2, 3, 4, 5, 6, 7, 8, 9, 10, 11, 12, 13, 14, 15, 16, 17, 18, 19, 20, 21, 22, 23, 24, 25, 26, 27, 28, 29, 30, 31, 32, 33, 34, 35, 36, 37, 38, 39, 40, 41, 42, 43, 44, 45, 46, 47, 48, 49, or 50 residues from an amino acid sequence selected from the group consisting of SEQ ID NOs: 603-606, 2037-2040, and 2045-2050.

[0073] In some embodiments, the recombinant polypeptide comprises, consists of, or consists essentially of at least two immunogenic fragments of SARS-CoV-2 spike glycoprotein, wherein the at least two immunogenic fragments each comprise an N-terminus region, an intervening region, and a C-terminus region, wherein the N-terminus region of each immunogenic fragment comprises, consists of, or consists essentially of an amino acid sequence that differs at a total of 1, 2, 3, 4, 5, 6, 7, 8, 9, 10, 11, 12, 13, 14, or 15 residues from an amino acid sequence selected from the group consisting of SEQ ID NOs: 245-289 and 293-362, and amino acid sequences DYS, YS, and S, preferably selected from SEQ ID NOs: 245-248, 250-251, 255-261, 256-258, 293-296, 298-299, 303-309, 304-306, 314-317, 319-320, 324-330, 325-327, 342-345, 347-348, 352-358, and 353-355, and wherein the C-terminus region of each immunogenic fragment comprises, consists of, or consists essentially of an amino acid sequence that differs at a total of 1, 2, 3, 4, 5, 6, 7, 8, 9, 10, 11, 12, 13, 14, or 15 residues from an amino acid sequence selected from the group consisting of SEQ ID NOs: 363-398 and 402-423, and amino acid sequences STN, ST, and S, preferably selected from SEQ ID NOs:382-397, 382-387, 388-393, 394-397, 385-390, 391-395, and 421-423, and wherein the intervening region comprises, consists of, or consists essentially of, an amino acid sequence with at least 60%, at least 61%, at least 62%, at least 63%, at least 64%, at least 65%, at least 66%, at least 67%, at least 68%, at least 69%, at least 70%, at least 71%, at least 72%, at least 73%, at least 74%, at least 75%, at least 76%, at least 77%, at least 78%, at least 79%, at least 80%, at least 81%, at least 82%, at least 83%, at least 84%, at least 85%, at least 86%, at least 87%, at least 88%, at least 89%, at least 90%, at least 91%, at least 92%, at least 93%, at least 94%, at least 95%, at least 96%, at least 97%, at least 98%, or at least 99% identity to an amino acid sequence selected from the group consisting of SEQ ID NO: 603-606, 2037-2040, and 2045-2050.

[0074] In some embodiments, the recombinant polypeptide comprises, consists of, or consists essentially of at least three immunogenic fragment of SARS-CoV-2 spike glycoprotein, wherein the at least three immunogenic fragments each comprise an N-terminus region, an intervening region, and a C-terminus region, wherein the N-terminus region of each immunogenic fragment comprises, consists of, or consists essentially of an amino acid sequence that differs at a total of 1, 2, 3, 4, 5, 6, 7, 8, 9, 10, 11, 12, 13, 14, or 15 residues from an amino acid sequence selected from the group consisting of SEQ ID NOs: 245-289 and 293-362, and amino acid sequences DYS, YS, and S, preferably selected from SEQ ID NOs: 245-248, 250-251, 255-261, 256-258, 293-296, 298-299, 303-309, 304-306, 314-317, 319-320, 324-330, 325-327, 342-345, 347-348, 352-358, and 353-355, and wherein the C-terminus region of each immunogenic fragment comprises, consists of, or consists essentially of an amino acid sequence that differs at a total of 1, 2, 3, 4, 5, 6, 7, 8, 9, 10, 11, 12, 13, 14, or 15 residues from an amino acid sequence selected from the group consisting of SEQ ID NOs: 363-398 and 402-423, and amino acid sequences STN, ST, and S, preferably selected from SEQ ID NOs: 382-397, 382-387, 388-393, 394-397, 385-390, 391-395, and 421-423, and wherein the intervening region comprises, consists of, or consists essentially of, an amino acid sequence with at least 60%, at least 61%, at least 62%, at least 63%, at least 64%, at least 65%, at least 66%, at least 67%, at least 68%, at least 69%, at least 70%, at least 71%, at least 72%, at least 73%, at least 74%, at least 75%, at least 76%, at least 77%, at least 78%, at least 79%, at least 80%, at least 81%, at least 82%, at least 83%, at least 84%, at least 85%, at least 86%, at least 87%, at least 88%, at least 89%, at least 90%, at least 91%, at least 92%, at least 93%, at least 94%, at least 95%, at least 96%, at least 97%, at least 98%, or at least 99% identity to an amino acid sequence selected from the group consisting of SEQ ID NO: 603-606, 2037-2040, and 2045-2050.

[0075] In some embodiments, the recombinant polypeptide comprises, consists of, or consists essentially of at least three immunogenic fragment of SARS-CoV-2 spike glycoprotein, wherein the at least three immunogenic fragments each comprise an N-terminus region, an intervening region, and a C-terminus region, wherein the N-terminus region of each immunogenic fragment comprises, consists of, or consists essentially of an amino acid sequence that differs at a total of 1, 2, 3, 4, 5, 6, 7, 8, 9, 10, 11, 12, 13, 14, or 15 residues from an amino acid sequence selected from the group consisting of SEQ ID NOs: 245-289 and 293-362, and amino acid sequences DYS, YS, and S, preferably selected from SEQ ID NOs: 245-248, 250-251, 255-261, 256-258, 293-296, 298-299, 303-309, 304-306, 314-317, 319-320, 324-330, 325-327, 342-345, 347-348, 352-358, and 353-355, and wherein the C-terminus region of each immunogenic fragment comprises, consists of, or consists essentially of an amino acid sequence that differs at a total of 1, 2, 3, 4, 5, 6, 7, 8, 9, 10, 11, 12, 13, 14, or 15 residues from an amino acid sequence selected from the group consisting of SEQ ID NOs: 363-398 and 402-423, and amino acid sequences STN, ST, and S, preferably selected from SEQ ID NOs: 382-397, 382-387, 388-393, 394-397, 385-390, 391-395, and 421-423, and wherein the intervening region comprises, consists of, or consists essentially of, an amino acid sequence that differs at 1, 2, 3, 4, 5, 6, 7, 8, 9, 10, 11, 12, 13, 14, 15, 16, 17, 18, 19, 20, 21, 22, 23, 24, 25, 26, 27, 28, 29, 30, 31, 32, 33, 34, 35, 36, 37, 38, 39, 40, 41, 42, 43, 44, 45, 46, 47, 48, 49, or 50 residues from an amino acid sequence selected from the group consisting of SEQ ID NOs: 603-606, 2037-2040, and 2045-2050.

[0076] In some embodiments, the recombinant polypeptide comprises, consists of, or consists essentially of two immunogenic fragment of SARS-CoV-2 spike glycoprotein, wherein the two immunogenic fragments each comprise an N-terminus region, an intervening region, and a C-terminus region, wherein the N-terminus region of each immunogenic fragment comprises, consists of, or consists essentially of an amino acid sequence that differs at a total of 1, 2, 3, 4, 5, 6, 7, 8, 9, 10, 11, 12, 13, 14, or 15 residues from an amino acid sequence selected from the group consisting of SEQ ID NOs: 245-289 and 293-362, and amino acid sequences DYS, YS, and S, preferably selected from SEQ ID NOs: 245-248, 250-251, 255-261, 256-258, 293-296, 298-299, 303-309, 304-306, 314-317, 319-320, 324-330, 325-327, 342-345, 347-348, 352-358, and 353-355, and wherein the C-terminus region of each immunogenic fragment comprises, consists of, or consists essentially of an amino acid sequence that differs at a total of 1, 2, 3, 4, 5, 6, 7, 8, 9, 10, 11, 12, 13, 14, or 15 residues from an amino acid sequence selected from the group consisting of SEQ ID NOs: 363-398 and 402-423, and amino acid sequences STN, ST, and S, preferably selected from SEQ ID NOs: 382-397, 382-387, 388-393, 394-397, 385-390, 391-395, and 421-423, and wherein the intervening region comprises, consists of, or consists essentially of, an amino acid sequence with at least 60%, at least 61%, at least 62%, at least 63%, at least 64%, at least 65%, at least 66%, at least 67%, at least 68%, at least 69%, at least 70%, at least 71%, at least 72%, at least 73%, at least 74%, at least 75%, at least 76%, at least 77%, at least 78%, at least 79%, at least 80%, at least 81%, at least 82%, at least 83%, at least 84%, at least 85%, at least 86%, at least 87%, at least 88%, at least 89%, at least 90%, at least 91%, at least 92%, at least 93%, at least 94%, at least 95%, at least 96%, at least 97%, at least 98%, or at least 99% identity to an amino acid sequence selected from the group consisting of SEQ ID NO: 603-606, 2037-2040, and 2045-2050.

[0077] In some embodiments, the recombinant polypeptide comprises, consists of, or consists essentially of two immunogenic fragment of SARS-CoV-2 spike glycoprotein, wherein the two immunogenic fragments each comprise an N-terminus region, an intervening region, and a C-terminus region, wherein the N-terminus region of each immunogenic fragment comprises, consists of, or consists essentially of an amino acid sequence that differs at a total of 1, 2, 3, 4, 5, 6, 7, 8, 9, 10, 11, 12, 13, 14, or 15 residues from an amino acid sequence selected from the group consisting of SEQ ID NOs: 245-289 and 293-362, and amino acid sequences DYS, YS, and S, preferably selected from SEQ ID NOs: 245-248, 250-251, 255-261, 256-258, 293-296, 298-299, 303-309, 304-306, 314-317, 319-320, 324-330, 325-327, 342-345, 347-348, 352-358, and 353-355, and wherein the C-terminus region of each immunogenic fragment comprises, consists of, or consists essentially of an amino acid sequence that differs at a total of 1, 2, 3, 4, 5, 6, 7, 8, 9, 10, 11, 12, 13, 14, or 15 residues from an amino acid sequence selected from the group consisting of SEQ ID NOs: 363-398 and 402-423, and amino acid sequences STN, ST, and S, preferably selected from SEQ ID NOs: 382-397, 382-387, 388-393, 394-397, 385-390, 391-395, and 421-423, and wherein the intervening region comprises, consists of, or consists essentially of, an amino acid sequence that differs at 1, 2, 3, 4, 5, 6, 7, 8, 9, 10, 11, 12, 13, 14, 15, 16, 17, 18, 19, 20, 21, 22, 23, 24, 25, 26, 27, 28, 29, 30, 31, 32, 33, 34, 35, 36, 37, 38, 39, 40, 41, 42, 43, 44, 45, 46, 47, 48, 49, or 50 residues from an amino acid sequence selected from the group consisting of SEQ ID NOs: 603-606, 2037-2040, and 2045-2050.

[0078] In some embodiments, the recombinant polypeptide comprises, consists of, or consists essentially of three immunogenic fragment of SARS-CoV-2 spike glycoprotein, wherein the three immunogenic fragments each comprise an N-terminus region, an intervening region, and a C-terminus region, wherein the N-terminus region of each immunogenic fragment comprises, consists of, or consists essentially of an amino acid sequence that differs at a total of 1, 2, 3, 4, 5, 6, 7, 8, 9, 10, 11, 12, 13, 14, or 15 residues from an amino acid sequence selected from the group consisting of SEQ ID NOs: 245-289 and 293-362, and amino acid sequences DYS, YS, and S, preferably selected from SEQ ID NOs: 245-248, 250-251, 255-261, 256-258, 293-296, 298-299, 303-309, 304-306, 314-317, 319-320, 324-330, 325-327, 342-345, 347-348, 352-358, and 353-355, and wherein the C-terminus region of each immunogenic fragment comprises, consists of, or consists essentially of an amino acid sequence that differs at a total of 1, 2, 3, 4, 5, 6, 7, 8, 9, 10, 11, 12, 13, 14, or 15 residues from an amino acid sequence selected from the group consisting of SEQ ID NOs: 363-398 and 402-423, and amino acid sequences STN, ST, and S, preferably selected from SEQ ID NOs: 382-397, 382-387, 388-393, 394-397, 385-390, 391-395, and 421-423, and wherein the intervening region comprises, consists of, or consists essentially of, an amino acid sequence with at least 60%, at least 61%, at least 62%, at least 63%, at least 64%, at least 65%, at least 66%, at least 67%, at least 68%, at least 69%, at least 70%, at least 71%, at least 72%, at least 73%, at least 74%, at least 75%, at least 76%, at least 77%, at least 78%, at least 79%, at least 80%, at least 81%, at least 82%, at least 83%, at least 84%, at least 85%, at least 86%, at least 87%, at least 88%, at least 89%, at least 90%, at least 91%, at least 92%, at least 93%, at least 94%, at least 95%, at least 96%, at least 97%, at least 98%, or at least 99% identity to an amino acid sequence selected from the group consisting of SEQ ID NO: 603-606, 2037-2040, and 2045-2050.

[0079] Recombinant polypeptides of the invention can comprise, consist of, or consist essentially of any combination of immunogenic fragments disclosed herein. For example, in one embodiment, when a recombinant polypeptide comprises, consists of, or consists essentially of three immunogenic fragments, wherein the at least three immunogenic fragments each comprise an N-terminus region, an intervening region, and a C-terminus region, wherein the N-terminus region of each immunogenic fragment comprises, consists of, or consists essentially of an amino acid sequence that differs at a total of 1, 2, 3, 4, 5, 6, 7, 8, 9, 10, 11, 12, 13, 14, or 15 residues from an amino acid sequence selected from the group consisting of SEQ ID NOs: 245-289 and 293-362, and amino acid sequences DYS, YS, and S, preferably selected from SEQ ID NOs: 245-248, 250-251, 255-261, 256-258, 293-296, 298-299, 303-309, 304-306, 314-317, 319-320, 324-330, 325-327, 342-345, 347-348, 352-358, and 353-355, and wherein the C-terminus region of each immunogenic fragment comprises, consists of, or consists essentially of an amino acid sequence that differs at a total of 1, 2, 3, 4, 5, 6, 7, 8, 9, 10, 11, 12, 13, 14, or 15 residues from an amino acid sequence selected from the group consisting of SEQ ID NOs: 363-398 and 402-423, and amino acid sequences STN, ST, and S, preferably selected from SEQ ID NOs: 382-397, 382-387, 388-393, 394-397, 385-390, 391-395, and 421-423, and wherein the intervening region comprises, consists of, or consists essentially of, an amino acid sequence that differs at 1, 2, 3, 4, 5, 6, 7, 8, 9, 10, 11, 12, 13, 14, 15, 16, 17, 18, 19, 20, 21, 22, 23, 24, 25, 26, 27, 28, 29, 30, 31, 32, 33, 34, 35, 36, 37, 38, 39, 40, 41, 42, 43, 44, 45, 46, 47, 48, 49, or 50 residues from an amino acid sequence selected from the group consisting of SEQ ID NOs: 603-606, 2037-2040, and 2045-2050.

[0080] In some embodiments, wherein the recombinant polypeptide includes a plurality of immunogenic fragments, the immunogenic fragments are connected to each other via a linker. The linker can be any suitable linker. Suitable linkers include a polypeptide comprising, consisting of, or consisting essentially of, an amino acid sequence of 1-35 residues, wherein each residue is independently serine, glycine, or aspartic acid, and further wherein the amino acid sequence contains zero or one aspartic acid residues. Other suitable linkers include a polypeptide comprising an amino acid sequence selected from the group consisting of SEQ ID NO: 65 (Fc1), SEQ ID NO: 67 (Fc1-TEV), SEQ ID NO: 69 (Fc1-Rv3C), SEQ ID NO: 193 (Short), SEQ ID NO: 195 (Medium), and SEQ ID NO: 197 (Long). When a recombinant polypeptide includes two or more such linkers, the amino acid sequence of the linkers can be identical or different. In some embodiments, wherein the recombinant polypeptide includes a plurality of immunogenic fragments, the immunogenic fragments are connected directly to each other without an intervening linker.

[0081] Certain embodiments of the recombinant polypeptide that include a plurality of immunogenic fragments provide for, for instance, a flexible expression platform with robust expression of full-length protein, modality to modify individual or multiple domains within one or more of the plurality of immunogenic fragments to reflect the most recent virus variant sequence(s), allow for single step affinity purification, in certain embodiments achieving high levels of purity, e.g., greater than 90%), and provide high-level, long-term immune response as tested in Rhesus macaques.

[0082] The inventors have found that recombinant polypeptides of the invention containing immunogenic fragments comprising certain endpoint sequences exhibit one or more unexpected and/or surprising properties. Such surprising properties of the recombinant polypeptides include, but are not limited to, unusually high levels of protein expression, unusually high levels of protease resistance, and unusually high resistance to protein precipitation in solution. These properties are all of particular relevance to the production, use and effectiveness of biologically active and economically viable vaccine compositions.

[0083] In some embodiments, the recombinant polypeptide of the invention can be expressed at a concentration of at least 5, at least 10, at least 15, at least 20, at least 25, at least 30, at least 35, at least 40, at least 45, at least 50, at least 55, at least 60, at least 65, at least 70, at least 75, at least 80, at least 85, at least 90, at least 95, at least 100, at least 105, at least 110, at least 115, at least 120, at least 125, or at least 130 mg of protein per liter of culture (e.g., “mg protein/L culture”). In some embodiments, the concentration is a range, wherein the lower and upper limit of the range are values from the preceding “at least” list, so long as the lower limit value is less than the upper limit value. For instance, a range can be 50-120 mg protein/L culture. In an embodiment, the concentration is at least 5 mg protein/L culture. In another embodiment, the concentration is at least 30 mg protein/L culture. In another embodiment, the concentration is at least 100 mg protein/L culture.

[0084] Quantitation of protein concentration can be by any suitable method. For instance, protein concentration can be calculated using absorbance of 280 nm light and protein-specific extinction coefficients determined in silico according to the expected amino acid composition of the recombinant polypeptide. Protein-specific extinction coefficients can be determined by any suitable method in the art, including the ExPaSy ProtParam tool at web.expasy.org/protparam (Gasteiger et al., Protein Identification and Analysis Tools on the ExPASy Server; (In) John M. Walker (ed): The Proteomics Protocols Handbook, Humana Press (2005). pp. 571-607) or the protein characterization tools provided within the SNAPGENE™ viewer software platform.

[0085] Moreover, an embodiment of the invention is a method of producing a vaccine composition, wherein the method comprises, consists of, or consists essentially of culturing a recombinant polynucleotide of the invention as described herein, whereby a recombinant polypeptide as described herein is produced, wherein the culturing process yields a concentration of the recombinant polypeptide of at least 5, at least 10, at least 15, at least 20, at least 25, at least 30, at least 35, at least 40, at least 45, at least 50, at least 55, at least 60, at least 65, at least 70, at least 75, at least 80, at least 85, at least 90, at least 95, at least 100, at least 105, at least 110, at least 115, at least 120, at least 125, or at least 130 mg of protein per liter of culture (e.g., “mg protein/L culture”). In some embodiments, the concentration is a range, wherein the lower and upper limit of the range are values from the preceding “at least” list, so long as the lower limit value is less than the upper limit value. For instance, a range can be 50-120 mg protein/L culture. In an embodiment, the concentration is at least 5 mg protein/L culture. In another embodiment, the concentration is at least 30 mg protein/L culture. In another embodiment, the concentration is at least 100 mg protein/L culture. In one embodiment, the vaccine production method includes only a single affinity chromatography step for purification to yield a pharmaceutically pure vaccine composition, e.g., Protein A-resin or Protein G resin. In this embodiment, no additional binding of antigenic protein followed by elution is used to further purify the vaccine composition.

[0086] The culture or fermentation process for achieving such concentrations of the recombinant polypeptide can be any suitable culture or fermentation process. In some embodiments, the process is carried out in CHO cells and utilizes a defined media kit, e.g., MIRUS™ CHO-S. In certain embodiments, the recombinant polypeptide is encoded by a recombinant polynucleotide, wherein the recombinant polynucleotide is a vector selected from the group consisting of a pcDNA3.1, a pSV, a pCMV, a pBApo-CMV, and a pBApo-EFlalpha expression vector, preferably a pcDNA3.1 vector. In certain embodiments, the vector is transiently transfected into CHO-S cells, wherein the recombinant polypeptide encoded by the vector is expressed under the control of a constitutive promoter within cell culture conditions ranging from 30-37° C. and 1-14 days in CO₂ (8%) incubators with rotary shaking agitation at speeds of 150 RPM.

[0087] In some embodiments, the recombinant polypeptides exhibit unusually high protease resistance during purification. Purification can be by any suitable purification process, for example by affinity purification, such as protein-A agarose single step purification. In some instances, such purification is desirable due to its highly scalable nature. Protease resistance can be analyzed using any suitable method, for example by SDS-PAGE analysis. For example, protease degradation during protein production in the cell can be determined using SDS-PAGE and protein staining after affinity purification with Protein-A resin. Following such purification, a recombinant polypeptide can be subjected to SDS-PAGE electrophoresis. Protease degraded protein can be observed as protein bands within a sample that are smaller than the expected full-length proteins. This can be quantified as a percentage of total protein using densitometry analysis features contained within the image analysis software such as ImageJ (Image Processing and Analysis in Java; from NIH; (imagej.nih.gov/ij/index.html) or other suitable software. The densitometry values of all major protein species are summed and then used as a denominator to calculate percentages of individual proteins. A protein resistance percentage can thus be calculated by dividing the densitometry value of the full-length protein by the sum of all identified major protein species. Once a base-line percentage of degraded protein is set at the time of purification for a given lot, protease degradation during storage and/or subsequent handling can be assessed using similar methods to determine if the percentage degradation has shifted. Mass spectrometry can also be used to positively identify and characterize the proteins and/or breakdown products of interest (e.g., degradation products, sites of proteolysis, etc, or whether there are host cell proteins contained within the preparation).

[0088] In some embodiments, the recombinant polypeptide exhibits at least 70%, at least 71%, at least 72%, at least 73%, at least 74%, at least 75%, at least 76%, at least 77%, at least 78%, at least 79%, at least 80%, at least 81%, at least 82%, at least 83%, at least 84%, at least 85%, at least 86%, at least 87%, at least 88%, at least 89%, at least 90%, at least 91%, at least 92%, at least 93%, at least 94%, at least 95%, at least 96%, at least 97%, at least 98%, or at least 99% protease resistance. In an embodiment, the recombinant polypeptide exhibits at least 90% protease resistance. In an embodiment, the recombinant polypeptide exhibits at least 91% protease resistance. In an embodiment, the recombinant polypeptide exhibits at least 92% protease resistance. In an embodiment, the recombinant polypeptide exhibits at least 93% protease resistance. In an embodiment, the recombinant polypeptide exhibits at least 94% protease resistance. In an embodiment, the recombinant polypeptide exhibits at least 95% protease resistance. In an embodiment, the recombinant polypeptide exhibits at least 96% protease resistance. In an embodiment, the recombinant polypeptide exhibits at least 97% protease resistance. In an embodiment, the recombinant polypeptide exhibits at least 98% protease resistance. In an embodiment, the recombinant polypeptide exhibits at least 99% protease resistance.

[0089] In some embodiments, the recombinant polypeptides exhibit unusually high resistance to protein precipitation in solution. The amount of protein precipitation in a solution is indicative of the amount of misfolded or aggregated protein contained within the solution. The amount of protein precipitation can be measured using any suitable method in the art. For instance, one method (“heat treatment method”) includes heating a protein-containing solution from a baseline temperature to a specific higher temperature, allowing the protein-containing solution to remain at that specific higher temperature for a specific amount of time, allowing the protein containing solution to return to room temperature, and then assaying the protein-containing solution. Suitable assays include visual assessment and scoring of turbidity, measurement of precipitate by weight following centrifugation, SDS-PAGE electrophoresis, mass spectrometry, and UV-Visible spectrometry. When visual assessment and scoring of turbidity is used, a scoring system from 0, meaning totally transparent, no precipitated material, to + to ++ to +++ to ++++, is employed. In some embodiments, using such a scoring system, recombinant polypeptide-containing solutions scored a 0 following the heat treatment method described above. Alternatively, a spectrophotometric determination may be made by light scattering of the protein-containing solution of 600 nanometer light on a UV-visible spectrophotometer can be used to determine the extent of precipitation or aggregation of the protein sample. In general, lower absorbances of 600 nanometers corresponds to lower precipitation or aggregation of protein from solution. Ranges of of Absorbance (light scattering) of 600 nanometer light can be divided into ranges of light scattering from low to no scattering caused from precipitation or aggregation, for example; 0.000 to 0.050 A600 (absorbance of 600 nm light), low precipitation or aggregation could exhibit scattering of 0.050-0.200 A600, medium precipitation or aggregation could exhibit scattering of 0.200 to 0.500 A600, high precipitation or aggregation can exhibit scattering of 0.500 to 1.000 A600, exceptionally high precipitation or aggregation can exhibit scattering of 1.000 A600 or greater turbidity. Accordingly, in some embodiments, a recombinant polypeptide exhibits 0.000 to 0.200, 0.050-0.200, or 0.000 to 0.050 A600 absorbance.

[0090] In certain embodiments, a recombinant polypeptide does not comprise, consist of, or consist essentially of one or more particular amino acid sequences. For instance, in some embodiments, a recombinant polypeptide does not comprise, consist of, or consist essentially of an amino sequence selected from the group consisting of SEQ ID NOs: 1, 3, 5, 7, 9, 11, 13, 15, 17, 19, 21, 23, 25, 27, 29, 31, 33, 35, 37, 39, 41, 43, 45, 47, 49, 51, 53, 55, 57, 59, 61, 63, 73, 75, 77, 79, 81, 83, 85, 87, 89, 91, 93, 95, 97, 99, 101, 103, 105, 107, 109, 111, 113, 115, 117, 119, 121, 123, 125, 127, 129, 131, 133, 135, 137, 139, 141, 143, 145, 147, 149, 151, 153, 155, 157, 159, 161, 163, 165, 167, 169, 171, 173, 175, 177, 179, 181, 183, 185, 187, 189, 191, 199, 201, 203, 205, 207, 209, 211, 213, 215, 217, 219, 221, 223, 225, 227, 229, 231, 233, 235, 237, 239, 241, 243, and 2057-2066, or any combination thereof. In another embodiment, a recombinant polypeptide does not comprise, consist of, or consist essentially of an amino sequence selected from the group consisting of SEQ ID NOs: 1, 3, 5, 7, 9, 11, 13, 15, 17, 19, 21, 23, 25, 27, 29, 31, 33, 35, 37, 39, 41, 43, 45, 47, 49, 51, 53, 55, 57, 59, 61, 63, 73, 75, 77, 79, 81, 83, 85, 87, 89, 91, 93, 95, 97, 99, 101, 103, 105, 107, 109, 111, 113, 115, 117, 119, 121, 123, 125, 127, 129, 131, 133, 135, 137, 139, 141, 143, 145, 147, 149, 151, 153, 155, 157, 159, 161, 163, 165, 167, 169, 171, 173, 175, 177, 179, 181, 183, 185, 187, 189, 191, 217, 219, 221, 223, 225, 227, 229, 231, 233, 235, 237, 239, 241, 243, and 2057-2066, or any combination thereof.

[0091] In certain embodiments, a polynucleotide encoding a recombinant polypeptide does not comprise, consist of, or consist essentially of one or more particular nucleotide sequences. For instance, in some embodiments, a polynucleotide encoding an immunogenic fragment does not comprise, consist of, or consist essentially of a nucleotide sequence selected from the group consisting of SEQ ID NOs: 2, 4, 6, 8, 10, 12, 14, 16, 18, 20, 22, 24, 26, 28, 30, 32, 34, 36, 38, 40, 42, 44, 46, 48, 50, 52, 54, 56, 58, 60, 62, 64, 74, 76, 78, 80, 82, 84, 86, 88, 90, 92, 94, 96, 98, 100, 102, 104, 106, 108, 110, 112, 114, 116, 118, 120, 122, 124, 126, 128, 130, 132, 134, 136, 138, 140, 142, 144, 146, 148, 150, 152, 154, 156, 158, 160, 162, 164, 166, 168, 170, 172, 174, 176, 178, 180, 182, 184, 186, 188, 190, 192, 200, 202, 204, 206, 208, 210, 212, 214, 216, 218, 220, 222, 224, 226, 228, 230, 232, 234, 236, 238, 240, 242, 244, and 2067-2076, or any combination thereof. In another embodiment, a polynucleotide encoding an immunogenic fragment does not comprise, consist of, or consist essentially of a nucleotide sequence selected from the group consisting of 2, 4, 6, 8, 10, 12, 14, 16, 18, 20, 22, 24, 26, 28, 30, 32, 34, 36, 38, 40, 42, 44, 46, 48, 50, 52, 54, 56, 58, 60, 62, 64, 74, 76, 78, 80, 82, 84, 86, 88, 90, 92, 94, 96, 98, 100, 102, 104, 106, 108, 110, 112, 114, 116, 118, 120, 122, 124, 126, 128, 130, 132, 134, 136, 138, 140, 142, 144, 146, 148, 150, 152, 154, 156, 158, 160, 162, 164, 166, 168, 170, 172, 174, 176, 178, 180, 182, 184, 186, 188, 190, 192, 218, 220, 222, 224, 226, 228, 230, 232, 234, 236, 238, 240, 242, 244, and 2067-2076, or any combination thereof.

[0092] In some embodiments, a recombinant polypeptide does not comprise, consist of, or consist essentially of an immunogenic fragment comprising an intervening region comprising, consisting of, or consisting essentially of an amino acid sequence selected from the group consisting of SEQ ID NOs: 603-606, 2037-2040, and 2045-2050, and optionally an N-terminus-adjacent region sequence, and/or a C-terminus-adjacent region sequence, wherein the intervening region amino acid sequence further comprises one or more of the following amino acid substitutions, wherein the positions are relative to the first residue of the amino acid sequence selected from the group consisting of SEQ ID NOs: 603-606, 2037-2040, and 2045-2050: G(−)28D, R(−)21K, S3L, S5P, S7F, K49N, K49T, N72K, G78S, L84R, S109N, T110K, E116K, E116Q, E116A, Q125R, Q128S, Q130R, N133Y, Y137H, and T179K. In one embodiment, the one or more amino acid substitutions is L84R. In another embodiment, the one or more amino acid substitutions is E116K. In a further embodiment, the one or more amino acid substitutions are K49N, E116K, and N133Y. In yet another embodiment, the one or more amino acid substitutions are K49T, E116K, and N133Y. In another embodiment, the one or more amino acid substitutions are K49T, L84R, E116K, and N133Y. In another embodiment, the one or more amino acid substitutions and/or deletions are L84R; or E116K; or K49N, E116K, and N133Y; or K49T, E116K, and N133Y; or K49T, L84R, E116K, and N133Y.

[0093] In some embodiments, the recombinant polypeptide further comprises, consists of, or consists essentially of an amino acid sequence that encodes an antibody Fc region. The antibody Fc region can be any suitable antibody Fc region. Suitable antibody Fc regions include wild-type human or other animal Immunoglobulin Fc regions such as IgG, IgA, IgD, IgE, IgM, and their respective subclasses, preferably IgA and its respective subclasses, and for example, human IgG1 Fc regions and Fc regions derived therefrom. Other suitable antibody Fc regions include mutant Fc regions that enhance or diminish Fc-receptor binding affinity to speed up or slow down uptake, respectively. In some embodiments, the antibody Fc region comprises the amino acid sequence of SEQ ID NO: 71.

[0094] In some embodiments containing an antibody Fc region, the at least one immunogenic fragment are connected to the antibody Fc region via a linker. The linker can be any suitable linker. Suitable linkers include a polypeptide comprising an amino acid sequence of 1-35 residues, wherein each residue is independently serine, glycine, or aspartic acid, and further wherein the amino acid sequence contains zero or one aspartic acid residues. Other suitable linkers include a polypeptide comprising an amino acid sequence selected from the group consisting of SEQ ID NO: 65 (Fc1), SEQ ID NO: 67 (Fc1-TEV), SEQ ID NO: 69 (Fc1-Rv3C), SEQ ID NO: 193 (Short), SEQ ID NO: 195 (Medium), and SEQ ID NO: 197 (Long). When a recombinant polypeptide includes two or more such linkers, the amino acid sequence of the linkers can be identical or different from each other. In some embodiments, wherein the recombinant polypeptide includes at least one immunogenic fragment connected to the N-terminus of the Fc region, and/or at least one immunogenic fragment is connected to the C-terminus of the Fc region, the immunogenic fragment(s) nearest to the Fc region are connected directly to the Fc region without an intervening linker.

[0095] Within the recombinant polypeptide, the at least one immunogenic fragment can be arranged in any suitable serial orientation with respect to the Fc region. In some embodiments, the at least one immunogenic fragment is connected to the N-terminus of the Fc region. This orientation can be depicted as [immunogenic fragment]x—[N-terminus—Fc region—C-terminus], wherein X is an integer 1-10, 1-9, 1-8, 1-7, 1-6, 1-5, 1-4, 1-3, 1-2, 2-10, 2-9, 2-8, 2-7, 2-6, 2-5, 2-4, 2-3, 3-10, 3-9, 3-8, 3-7, 3-6, 3-5, 3-4, 4-10, 4-9, 4-8, 4-7, 4-6, 4-5, 5-10, −5-9, 5-8, 5-7, 5-6, 6-10, 6-9, 6-8, 6-7, 7-10, 7-9, 7-8, 8-10, 8-9, or 9-10 representing the number of immunogenic fragments within the recombinant polypeptide. In some embodiments, the at least one immunogenic fragment is connected to the C-terminus of the Fc region. This orientation can be depicted as [N-terminus—Fc region—C-terminus]—[immunogenic fragment]x, wherein X is an integer 1-10, 1-9, 1-8, 1-7, 1-6, 1-5, 1-4, 1-3, 1-2, 2-10, 2-9, 2-8, 2-7, 2-6, 2-5, 2-4, 2-3, 3-10, 3-9, 3-8, 3-7, 3-6, 3-5, 3-4, 4-10, 4-9, 4-8, 4-7, 4-6, 4-5, 5-10, −5-9, 5-8, 5-7, 5-6, 6-10, 6-9, 6-8, 6-7, 7-10, 7-9, 7-8, 8-10, 8-9, or 9-10 representing the number of immunogenic fragments within the recombinant polypeptide. In some embodiments, wherein the recombinant polypeptide includes at least two immunogenic fragments, at least one immunogenic fragment is connected to the N-terminus of the Fc region, and at least one immunogenic fragment is connected to the C-terminus of the Fc region. This orientation can be depicted as [immunogenic fragment]x—[N-terminus—Fc region—C-terminus]—[immunogenic fragment]Y, wherein X and Y are independently an integer 1-10, 1-9, 1-8, 1-7, 1-6, 1-5, 1-4, 1-3, 1-2, 2-10, 2-9, 2-8, 2-7, 2-6, 2-5, 2-4, 2-3, 3-10, 3-9, 3-8, 3-7, 3-6, 3-5, 3-4, 4-10, 4-9, 4-8, 4-7, 4-6, 4-5, 5-10, −5-9, 5-8, 5-7, 5-6, 6-10, 6-9, 6-8, 6-7, 7-10, 7-9, 7-8, 8-10, 8-9, or 9-10 representing the number of immunogenic fragments connected to each side of the Fc region. In some embodiments, wherein the recombinant polypeptide includes two immunogenic fragments, both immunogenic fragments are connected to the N-terminus of the Fc region. This orientation can be depicted as [immunogenic fragment]—[immunogenic fragment]—[N-terminus—Fc region—C-terminus]. In other embodiments, wherein the recombinant polypeptide includes two immunogenic fragments, both immunogenic fragments are connected to the C-terminus of the Fc region. This orientation can be depicted as [N-terminus—Fc region—C-terminus]—[immunogenic fragment][immunogenic fragment]. In some embodiments, wherein the recombinant polypeptide includes three immunogenic fragments, each immunogenic fragment is connected to the N-terminus of the Fc region. This orientation can be depicted as [immunogenic fragment]-[immunogenic fragment]—[immunogenic fragment]—[N-terminus—Fc region—C-terminus]. In other embodiments, wherein the recombinant polypeptide includes three immunogenic fragments, each immunogenic fragment is connected to the C-terminus of the Fc region. This orientation can be depicted as [N-terminus—Fc region—C-terminus]—[immunogenic fragment]—[immunogenic fragment]—[immunogenic fragment].

[0096] In some embodiments, the recombinant polypeptide comprises, consists of, or consists essentially of, an amino acid sequence with at least 80%, at least 81%, at least 82%, at least 83%, at least 84%, at least 85%, at least 86%, at least 87%, at least 88%, at least 89%, at least 90%, at least 91%, at least 92%, at least 93%, at least 94%, at least 95%, at least 96%, at least 97%, at least 98%, or at least 99% identity to an amino acid sequence selected from the group consisting of SEQ ID NOs: 1662-1746 and 1947-1976. In some embodiments, the recombinant polypeptide comprises, consists of, or consists essentially of, an amino acid sequence selected from the group consisting of SEQ ID NOs: 1662-1746 and 1947-1976. In some embodiments, the recombinant polypeptide comprises, consists of, or consists essentially of, an amino acid sequence with at least 80%, at least 81%, at least 82%, at least 83%, at least 84%, at least 85%, at least 86%, at least 87%, at least 88%, at least 89%, at least 90%, at least 91%, at least 92%, at least 93%, at least 94%, at least 95%, at least 96%, at least 97%, at least 98%, or at least 99% identity to an amino acid sequence selected from the group consisting of SEQ ID NOs: 1954, 1955, 1958, 1969, 1970, and 1973. In some embodiments, the recombinant polypeptide comprises, consists of, or consists essentially of, an amino acid sequence selected from the group consisting of SEQ ID NOs: 1954, 1955, 1958, 1969, 1970, and 1973.

[0097] In some embodiments, the recombinant polypeptide is encoded by a recombinant polynucleotide. In certain embodiments, the polynucleotide comprises, consists of, or consists essentially of a nucleic acid sequence with at least 80%, at least 81%, at least 82%, at least 83%, at least 84%, at least 85%, at least 86%, at least 87%, at least 88%, at least 89%, at least 90%, at least 91%, at least 92%, at least 93%, at least 94%, at least 95%, at least 96%, at least 97%, at least 98%, or at least 99% identity to a nucleotide sequence selected from the group consisting of SEQ ID NOs: 1832-1916 and 2007-2036. In some embodiments, the polynucleotide comprises, consists of, or consists essentially of a nucleic acid sequence selected from the group consisting of SEQ ID NOs: 1832-1916 and 2007-2036. In some embodiments, the recombinant polypeptide is encoded by a recombinant polynucleotide. In certain embodiments, the polynucleotide comprises, consists of, or consists essentially of a nucleic acid sequence with at least 80%, at least 81%, at least 82%, at least 83%, at least 84%, at least 85%, at least 86%, at least 87%, at least 88%, at least 89%, at least 90%, at least 91%, at least 92%, at least 93%, at least 94%, at least 95%, at least 96%, at least 97%, at least 98%, or at least 99% identity to a nucleotide sequence selected from the group consisting of SEQ ID NOs: 2014, 2015, 2018, 2029, 2030, and 2033. In some embodiments, the polynucleotide comprises, consists of, or consists essentially of a nucleic acid sequence selected from the group consisting of SEQ ID NOs: 2014, 2015, 2018, 2029, 2030, and 2033.

[0098] In some cases it is desirable to prepare a recombinant polypeptide suitable as a vaccine which does not comprise an Fc-region. However, the presence of an Fc region in a polypeptide can be, in certain cases, advantageous, insofar as the Fc region can allow for streamlined purification of the recombinant polypeptide and can increase the stability of the recombinant polypeptide. Accordingly, in some embodiments, a recombinant polypeptide comprising an Fc region is modified, such that the Fc region is removed. In some embodiments, the Fc region is removed enzymatically by any method suitable in the art. Non-limiting examples of suitable enzymes include papain, pepsin and IdeS. When a single recombinant polypeptide comprising an Fc region is so enzymatically treated, the result is two fragments, an Fc region-containing fragment and a non-Fc-containing fragment, which comprises the at least one immunogenic fragment.

[0099] In some embodiments, two recombinant polypeptides each comprising an Fc region form a dimer, wherein the Fc region of the first polypeptide associates with the Fc region of a second polypeptide (e.g., by means of disulfide bonds). When the dimer is enzymatically treated to remove the Fc region, the result varies depending on the enzyme used. In the case of papain, for example, the dimer is cleaved N-terminal to bridging disulfides in the Fc region producing 3 separate fragments: two Fab fragments and an Fc fragment. In the case of pepsin or IdeS, for example, the dimer is cleaved at the Fc region C-terminal to the bridging disulfide bonds, thereby creating a F(ab′)2, i.e., one fragment lacking the Fc region but still containing the at least one immunogenic fragment of each recombinant polypeptide, and a separate Fc region-containing polypeptide. Alternatively or in addition, protease cleavage sites can be encoded in the recombinant polynucleotide sequence encoding the recombinant polypeptide to produce a cleavable polypeptide using an array of proteases, including but not limited to: TEV protease, factor Xa protease, 2A protease, and 3C protease. Following digestion, the resultant recombinant polypeptide can be purified away from Fc polypeptides (or incompletely digested starting material) by Protein A or protein G subtraction chromatography, leaving a purified recombinant polypeptide free of Fc protein or Fc-containing protein, e.g., an Fc-free protein.

[0100] In some embodiments, the recombinant polypeptide includes at least three immunogenic fragments, of which at least one is a SARS-CoV-2 spike glycoprotein fragment as described herein, at least one is a SARS-CoV spike glycoprotein fragment, and at least one is a MERS-CoV spike glycoprotein fragment. Any suitable SARS-CoV spike glycoprotein fragment and any suitable MERS-CoV spike glycoprotein fragment can be used. For instance, a SARS-CoV spike glycoprotein fragment can be any suitable fragment of a wild-type SARS-CoV strain, whereas a MERS-CoV spike glycoprotein fragment can be any suitable fragment of a wild-type MERS-CoV strain. Examples of such strains include SARS coronavirus Tor2 (GenBank accession number NC_004718.3) and MERS coronavirus (GenBank accession number NC_019843.3).

[0101] In some embodiments, an immunogenic fragment comprises, consists of, or consists essentially of an amino acid sequence with at least 90%, preferably at least 91%, at least 92%, at least 93%, at least 94%, at least 95%, at least 96%, at least 97%, at least 98%, or at least 99% sequence identity to a wild-type SARS-CoV or MERS spike glycoprotein, or any portion thereof.

[0102] In some embodiments, the recombinant polypeptide includes at least three immunogenic fragments, of which at least one is a SARS-CoV-2 spike glycoprotein fragment as described herein, at least one is a SARS-CoV spike glycoprotein fragment as described herein, and at least one is a MERS-CoV spike glycoprotein fragment as described herein. In some embodiments, the recombinant polypeptide includes at least three immunogenic fragments, of which at least one is a SARS-CoV-2 spike glycoprotein fragment as described herein, at least one is a SARS-CoV spike glycoprotein fragment, wherein the SARS-CoV fragment comprises, consists of, or consists essentially of an amino acid sequence with at least 90%, preferably at least 91%, at least 92%, at least 93%, at least 94%, at least 95%, at least 96%, at least 97%, at least 98%, or at least 99% sequence identity to an amino acid sequence represented by SEQ ID NO: 199 (SARS-2003, SARS_short_h), or SEQ ID NO: 201 (SARS-2003, SARS_short_i); and at least one is a MERS-CoV spike glycoprotein fragment, wherein the MERS-CoV fragment comprises, consists of, or consists essentially of an amino acid sequence with at least 90%, preferably at least 91%, at least 92%, at least 93%, at least 94%, at least 95%, at least 96%, at least 97%, at least 98%, or at least 99% sequence identity to an amino acid sequence selected from the group consisting of SEQ ID NO: 203 (MERS_Lytic_a), SEQ ID NO: 205 (MERS_Lytic_b), SEQ ID NO: 207 (MERS_Lytic_c), SEQ ID NO: 209 (MERS_Lytic_d), SEQ ID NO: 211 (MERS_Lytic_e), SEQ ID NO: 213 (MERS_Lytic_f), and SEQ ID NO: 215 (MERS_Lytic_g).

[0103] In some embodiments, the recombinant polypeptide includes at least three immunogenic fragments, of which at least one is a SARS-CoV-2 spike glycoprotein fragment as described herein, at least one is a SARS-CoV spike glycoprotein fragment, wherein the SARS-CoV fragment comprises, consists of, or consists essentially of an amino acid sequence of SEQ ID NO: 199 (SARS-2003, SARS_short_h), or SEQ ID NO: 201 (SARS-2003, SARS_short_i); and at least one is a MERS-CoV spike glycoprotein fragment, wherein the MERS-CoV fragment comprises, consists of, or consists essentially of an amino acid sequence of an amino acid sequence selected from the group consisting of SEQ ID NO: 203 (MERS_Lytic_a), SEQ ID NO: 205 (MERS_Lytic_b), SEQ ID NO: 207 (MERS_Lytic_c), SEQ ID NO: 209 (MERS_Lytic_d), SEQ ID NO: 211 (MERS_Lytic_e), SEQ ID NO: 213 (MERS_Lytic_f), and SEQ ID NO: 215 (MERS_Lytic_g).

[0104] Another embodiment is a recombinant vector that comprises, consists of, or consists essentially of, a polynucleotide that encodes the recombinant polypeptide described herein. The recombinant vector can be any suitable vector. Examples of suitable recombinant vectors include but are not limited to a pcDNA3.1, a pSV, a pCMV, a pBApo-CMV, or a pBApo-EFlalpha expression vector.

[0105] Yet another embodiment is an isolated cell that includes the recombinant polypeptide described herein or a recombinant polynucleotide that contains a nucleotide sequence that encodes the recombinant polypeptide.

[0106] Another embodiment is a pharmaceutical composition that contains the recombinant polypeptide described herein and at least one pharmaceutically acceptable carrier. The at least one pharmaceutically acceptable carrier can be any suitable carrier. Examples of suitable carriers include water and any suitable buffer. Suitable buffers include HEPES-buffered saline and phosphate-buffered saline. In certain embodiments, the pharmaceutical composition further contains at least one adjuvant. The at least one adjuvant can be any suitable adjuvant. Examples of suitable adjuvants include alum adjuvants, emulsion adjuvants, and pattern recognition receptor agonist adjuvants. Further examples include AS03, MF59, CpG, Squalene Emulsion, Alum, aluminum hydroxide gels, calcium phosphate hydroxide, paraffin oil, cytokines (IL-1, IL-2, IL-12), killed bacterial products such as Bordetella and Mycobacterium bacteria, bacterial toxoids, squalene and DL-α-tocopherol emulsions, squalene-oil-in-water emulsion, aluminum phosphate gels, saponins, cyclic dinucleotides, and TLR agonists, preferably TLR1, TLR2, TLR4, TLR5, TLR7, TLR8, TLR9 etc., and any combination thereof. In certain embodiments, the adjuvant is AS03. In certain other embodiments, the adjuvant is Alum. In yet further embodiments, the pharmaceutical composition does not contain an adjuvant.

[0107] The pharmaceutical composition can contain any therapeutically effective amount of the recombinant polypeptide described herein. A therapeutically effective amount is an amount sufficient to induce an immune response against the target virus or viruses, for instance, SARS-CoV-2, SARS-CoV, and/or MERS-CoV, preferably SARS-CoV-2. Typically, a dosage is therapeutically effective if it prevents, inhibits, reduces, eliminates, protects against, and/or delays the onset of an infection or an infectious clinical condition caused by a beta coronavirus in a subject. Infectious clinical conditions include, for example, fever or chills, cough, shortness of breath or difficult breathing, fatigue, muscle or body aches, headache, loss of taste or smell, sore throat, congestion, runny nose, nausea, vomiting, and diarrhea. In some embodiments, a single dose of the pharmaceutical composition contains 10 nanograms to 1 milligram, 0.1-250 micrograms, 10-100 micrograms, or 12.5-50 micrograms of the recombinant polypeptide. In some embodiments, a single dose of the pharmaceutical composition contains 0.01-1, 0.1-1, 0.5-5, 1-20, or 5-15, 1-50, or 10-50 micrograms of the recombinant polypeptide. In some embodiments, wherein the pharmaceutical composition does not contain an adjuvant, a single dose of the pharmaceutical composition can contain 0.01-1, 0.1-1, 0.5-5, 1-20, or 5-15, 1-50, or 10-50 micrograms of the recombinant polypeptide. However, a single dose of the pharmaceutical composition can also contain increased amounts of the recombinant polypeptide, such as 100-1000, 100-250, or 250-500 micrograms of recombinant polypeptide.

[0108] A further embodiment is a method for preventing, inhibiting, reducing, eliminating, protecting against, or delaying the onset of an infection or an infectious clinical condition caused by a beta coronavirus in a subject comprising administering to the subject the recombinant polypeptide described herein, the polypeptide encoded by the recombinant polynucleotide described herein, or a dose of the pharmaceutical composition described herein. Examples of beta coronaviruses include SARS-CoV, MERS-CoV, and SARS-CoV-2.

[0109] Another embodiment is a method for inducing an immune response against a beta coronavirus in a subject comprising administering to the subject the recombinant polypeptide described herein, the polypeptide encoded by the recombinant polynucleotide described herein, or a dose of the pharmaceutical composition described herein. Examples of beta coronaviruses include SARS-CoV, MERS-CoV, and SARS-CoV-2.

[0110] In the methods described herein, administration can be achieved by any suitable administration method. Suitable administration methods include oral, parenteral, subcutaneous, intradermal, transdermal, intravenous, intramuscular, intrapulmonary, intranasal, intraarterial, intrathecal, and intraperitoneal administration.

[0111] In the methods described herein, the subject can be any suitable animal that is capable of being infected by a beta coronavirus, such as SARS-CoV, MERS-CoV, and SARS-CoV-2. The subject can be a human, non-human primate, horse, pig, cattle, cat, dog, sheep, mink, rodent, hamster, or bat, preferably human.

### Examples of Non-Limiting Aspects of the Disclosure

[0112] Aspects, including embodiments, of the invention described herein may be beneficial alone or in combination, with one or more other aspects or embodiments. Without limiting the foregoing description, certain non-limiting aspects of the disclosure numbered (1)-(41) are provided below. As will be apparent to those of skill in the art upon reading this disclosure, each of the individually numbered aspects may be used or combined with any of the preceding or following individually numbered aspects. This is intended to provide support for all such combinations of aspects and is not limited to combinations of aspects explicitly provided below:

[0113] (1) A recombinant polypeptide comprising at least one immunogenic fragment of Severe Acute Respiratory Syndrome Coronavirus 2 (SARS-CoV-2) spike glycoprotein, wherein each immunogenic fragment comprises an N-terminus region, wherein the N-terminus region comprises an amino acid sequence selected from the group consisting of SEQ ID NOs: 245-289 and 293-362, and amino acid sequences DYS, YS, and S, preferably selected from SEQ ID NOs: 245-248, 250-251, 255-261, 256-258, 293-296, 298-299, 303-309, 304-306, 314-317, 319-320, 324-330, 325-327, 342-345, 347-348, 352-358, and 353-355.

[0114] (2) The recombinant polypeptide of aspect 1, wherein each immunogenic fragment further comprises a C-terminus region, and the C-terminus region comprises an amino acid sequence selected from the group consisting of SEQ ID NOs: 363-398 and 402-423, and amino acid sequences STN, ST, and S, preferably selected from SEQ ID NOs: 382-397, 382-387, 388-393, 394-397, 385-390, 391-395, and 421-423.

[0115] (3) A recombinant polypeptide comprising at least one immunogenic fragment of SARS-CoV-2 spike glycoprotein, wherein each immunogenic fragment comprises an N-terminus region and a C-terminus region, and wherein the N-terminus region comprises an amino acid sequence that differs at at least 2 residues from an amino acid sequence selected from the group consisting of SEQ ID NOs: 245-289 and 293-362, and amino acid sequences DYS, YS, and S, preferably selected from SEQ ID NOs: 245-248, 250-251, 255-261, 256-258, 293-296, 298-299, 303-309, 304-306, 314-317, 319-320, 324-330, 325-327, 342-345, 347-348, 352-358, and 353-355, and the C-terminus region comprises an amino acid sequence that differs at at least 2 residues from an amino acid sequence selected from the group consisting of SEQ ID NOs: 363-398 and 402-423, and amino acid sequences STN, ST, and S, preferably selected from SEQ ID NOs: 382-397, 382-387, 388-393, 394-397, 385-390, 391-395, and 421-423.

[0116] (4) A recombinant polypeptide comprising at least one immunogenic fragment of SARS-CoV-2 spike glycoprotein, wherein each immunogenic fragment comprises an N-terminus region and a C-terminus region, and wherein the N-terminus region comprises an amino acid sequence of at least five contiguous amino acid residues of an amino acid sequence selected from the group consisting of SEQ ID NOs: 245, 293, 314, and 342, and the C-terminus region comprises an amino acid sequence of at least five contiguous amino acid residues of an amino acid sequence of SEQ ID NO: 363 or 402.

[0117] (5) The recombinant polypeptide of aspect 4, wherein each immunogenic fragment comprises an N-terminus region and a C-terminus region, and wherein the N-terminus region comprises an amino acid sequence of at least ten contiguous amino acid residues of an amino acid sequence selected from the group consisting of SEQ ID NOs: 245, 293, 314, and 342 and the C-terminus region comprises an amino acid sequence of at least ten contiguous amino acid residues of an amino acid sequence of SEQ ID NO: 363 or 402.

[0118] (6) The recombinant polypeptide of any one of aspects 1-5, wherein each immunogenic fragment comprises an intervening region between the N-terminus region and the C-terminus region, and wherein each intervening region comprises an amino acid sequence selected from the group consisting of SEQ ID NOs: 2045-2050 or that differs at at least 4 residues from an amino acid sequence selected from the group consisting of SEQ ID NOs: 603-606, and 2037-2040.

[0119] (7) The recombinant polypeptide of any one of aspects 1-6, wherein each of the at least one immunogenic fragments comprises an amino acid sequence with at least 95% sequence identity to an amino acid sequence independently selected from the group consisting of SEQ ID NOs: 1577-1661 and 1917-1946.

[0120] (8) The recombinant polypeptide of any of one aspects 1-7, wherein the polypeptide comprises at least two immunogenic fragments.

[0121] (9) The recombinant polypeptide of any one of aspects 1-8, wherein each immunogenic fragment of the at least one immunogenic fragments comprises the same amino acid sequence.

[0122] (10) The recombinant polypeptide of any one of aspects 1-8, wherein each immunogenic fragment of the at least one immunogenic fragment comprises a different amino acid sequence from each of the other immunogenic fragments.

[0123] (11) The recombinant polypeptide of any one of aspects 1-10, wherein the recombinant polypeptide is expressed at a concentration of at least 45 mg protein/L culture.

[0124] (12) The recombinant polypeptide of any one of aspects 1-11, wherein the recombinant polypeptide exhibits at least 85% protease resistance.

[0125] (13) The recombinant polypeptide of any one of aspect 1-14, wherein the recombinant polypeptide does not comprise an amino acid sequence selected from the group consisting of SEQ ID NOs: 1, 3, 5, 7, 9, 11, 13, 15, 17, 19, 21, 23, 25, 27, 29, 31, 33, 35, 37, 39, 41, 43, 45, 47, 49, 51, 53, 55, 57, 59, 61, 63, 73, 75, 77, 79, 81, 83, 85, 87, 89, 91, 93, 95, 97, 99, 101, 103, 105, 107, 109, 111, 113, 115, 117, 119, 121, 123, 125, 127, 129, 131, 133, 135, 137, 139, 141, 143, 145, 147, 149, 151, 153, 155, 157, 159, 161, 163, 165, 167, 169, 171, 173, 175, 177, 179, 181, 183, 185, 187, 189, 191, 217, 219, 221, 223, 225, 227, 229, 231, 233, 235, 237, 239, 241, 243, and 2057-2066.

[0126] (14) The recombinant polypeptide of any one of aspects 1-13, wherein the recombinant polypeptide further comprises an antibody Fc region.

[0127] (15) The recombinant polypeptide of any one of aspects 1-14, wherein the polypeptide comprises at least two immunogenic fragments, and wherein the at least two immunogenic fragments are connected to each other via a linker.

[0128] (16) The recombinant polypeptide of aspect 15, wherein the linker is a polypeptide comprising an amino acid sequence of 1-35 residues, wherein each residue is independently serine or glycine.

[0129] (17) The recombinant polypeptide of any one of aspects 14-16, wherein the at least one immunogenic fragment of the SARS-CoV-2 spike glycoprotein is connected to the antibody Fc region via a linker.

[0130] (18) The recombinant polypeptide of aspect 17, wherein the linker comprises an amino acid sequence selected from the group consisting of SEQ ID NOs: 65 (Fc1), SEQ ID NO: 67 (Fc1-TEV), SEQ ID NO: 69 (Fc1-Rv3C), SEQ ID NO: 193 (Short), SEQ ID NO: 195 (Medium), and SEQ ID NO: 197 (Long).

[0131] (19) The recombinant polypeptide of any one of aspects 14-18, wherein the antibody Fc region is from a human IgG1 antibody or derived therefrom.

[0132] (20) The recombinant polypeptide of aspect 19, wherein the antibody Fc region comprises the amino acid sequence of SEQ ID NO: 71.

[0133] (21) The recombinant polypeptide of any one of aspects 1-20, wherein the polypeptide comprises an amino acid sequence with at least 95% sequence identity to an amino acid sequence selected from the group consisting of SEQ ID NOs: 1662-1746 and 1947-1976.

[0134] (22) The recombinant polypeptide of aspect 21, wherein the polypeptide comprises an amino acid sequence selected from the group consisting of SEQ ID NOs: 1662-1746 and 1947-1976.

[0135] (23) A recombinant polynucleotide encoding the polypeptide of any one of aspects 1-22.

[0136] (24) The recombinant polynucleotide of aspect 23, wherein the polynucleotide comprises a nucleic acid sequence with at least 90%, preferably at least 91%, 92%, 93%, 94%, 95%, 96%, 97%, 98%, or 99%, sequence identity to a nucleic acid sequence selected from the group consisting of SEQ ID NOs: 1832-1916 and 2007-2036.

[0137] (25) The recombinant polynucleotide of aspect 24, wherein the polynucleotide comprises a nucleic acid sequence selected from the group consisting of SEQ ID NOs: 1832-1916 and 2007-2036.

[0138] (26) The recombinant polynucleotide of any one of aspects 23-25, wherein the nucleic acid sequence has been codon optimized.

[0139] (27) A pharmaceutical composition comprising the recombinant polypeptide of any one of aspects 1-22 or the polypeptide encoded by the recombinant polynucleotide of any one of aspects 23-26, and a pharmaceutically acceptable carrier.

[0140] (28) The pharmaceutical composition of aspect 27, wherein the pharmaceutical composition further comprises at least one adjuvant.

[0141] (29) The pharmaceutical composition of aspect 27, wherein the pharmaceutical composition does not comprise an adjuvant.

[0142] (30) The pharmaceutical composition of aspect 28, wherein the at least one adjuvant is selected from the group consisting of alum adjuvants, emulsion adjuvants, and pattern recognition receptor agonist adjuvants.

[0143] (31) The pharmaceutical composition of aspect 28, wherein the at least one adjuvant is AS03, MF59, CpG, Squalene Emulsion, Alum, aluminum hydroxide gels, calcium phosphate hydroxide, paraffin oil, cytokines (IL-1, IL-2, IL-12), killed bacterial products such as Bordetella and Mycobacterium bacteria, bacterial toxoids, squalene and DL-α-tocopherol emulsions, aluminum phosphate gels, saponins, cyclic dinucleotides, and TLR agonists, preferably TLR1, TLR2, TLR4, TLR5, TLR7, TLR8, TLR9 etc., and any combination thereof.

[0144] (32) The pharmaceutical composition of aspect 28, wherein the at least one adjuvant is a squalene-oil-in-water emulsion adjuvant.

[0145] (33) A vector comprising the recombinant polynucleotide of any one of aspects 23-26.

[0146] (34) An isolated cell comprising the recombinant polypeptide of any one of aspects 1-22, or the polypeptide encoded by the recombinant polynucleotide of any one of aspects 23-26.

[0147] (35) A method for preventing, inhibiting, reducing, eliminating, protecting, or delaying the onset of an infection or an infectious clinical condition caused by a beta coronavirus in a subject comprising administering to the subject the recombinant polypeptide of any one of aspects 1-22, the polypeptide encoded by the recombinant polynucleotide of any one of aspects 23-26, or the pharmaceutical composition of any one of aspects 27-32.

[0148] (36) A method for inducing an immune response against a beta coronavirus in a subject comprising administering to the subject the recombinant polypeptide of any one of aspects 1-22, the polypeptide encoded by the recombinant polynucleotide of any one of aspects 23-26, or the pharmaceutical composition of any one of aspects 27-32.

[0149] (37) The method of aspect 35 or 36, wherein the recombinant polypeptide of any one of aspects 1-22, the polypeptide encoded by the recombinant polynucleotide of any one of aspects 23-26, or the pharmaceutical composition of any one of aspects 27-32 is administered by oral, parenteral, subcutaneous, intradermal, transdermal, intravenous, intramuscular, intranasal, intrapulmonary, intraarterial, intrathecal, or interperitoneal administration.

[0150] (38) The method of any one of aspects 35-37, wherein the coronavirus is selected from the group consisting of SARS-CoV-2, SARS-CoV, and MERS-CoV

[0151] (39) The method of any one of aspects 35-38, wherein the subject is a mammal.

[0152] (40) The method of any one of aspects 35-39, wherein the mammal is a human or non-human primate.

[0153] (41) The use of the recombinant polypeptide of any one of aspects 1-22, the polypeptide encoded by the recombinant polynucleotide of any one of aspects 23-26, or the pharmaceutical composition of any one of aspects 27-32 for the preparation of a medicament for the treatment or prevention of illness caused by SARS-CoV-2.

[0154] (42) The recombinant polypeptide of any one of aspects 1-22, the polypeptide encoded by the recombinant polynucleotide of any one of aspects 23-26, or the pharmaceutical composition of any one of aspects 27-32 for use as a medicament.

### EXAMPLES

### Example 1

[0155] Cloning: Inserts encoding a certain fragment of SARS CoV-2 virus Spike protein S1 were designed. The inserts were codon optimized for CHO cell expression using IDTDNA codon optimization algorithms. The insert was cloned using either (a) restriction digests and DNA ligations or (b) NEB HiFi DNA assembly builder mix into a pcDNA3.1 vector containing appropriate secretion signal sequences, linkers, and tags for secreted fusion protein expression, as well as sequence encoding a human IgG1 Fc region. The resulting clone encoding a recombinant SARS CoV-2 Spike protein fragment—Fc region fusion protein (“recombinant CoV-2 fusion protein”) was verified by either colony PCR and/or restriction digests. DNA sequencing was also used.

[0156] Protein Expression: Supercoiled plasmid of the verified clone was transiently transfected into CHO-S cells and expressed under the control of a constitutive promoter within cell culture conditions ranging from 30-37° C. and 3-10 days in CO₂ (8%) incubators with rotary shaking agitation at speeds of 150 RPM. Cells were removed by centrifugation and culture medium containing the recombinant CoV-2 fusion protein were passed over Protein A agarose to bind the Fc region-containing CoV-2 protein. Filtration could also have been used to remove cells. The column containing bound recombinant CoV-2 fusion protein was washed with phosphate buffered saline. The recombinant CoV-2 fusion protein bound to the Protein A column was eluted with low pH glycine followed by neutralization in pH8.0 Tris. The recombinant CoV-2 fusion protein was dialyzed to remove glycine/tris and placed into HEPES-buffered saline (10 mM HEPES. 150 mM NaCl, pH adjusted with NaOH to pH 7.2-7.5). No additional purification was employed in this case. However, additional purification by any chromatography method such as HIC or ion exchange can optionally be used.

[0157] Following protein expression in accordance with the description above, resulting protein was analyzed by reducing SDS-PAGE to determine protein integrity for monomeric CTD-Fcs. Protein yields were calculated using absorbance of 280 nm light and protein-specific extinction coefficients determined in silico according to their expected amino acid composition. Representative protein yields are given in Table 3.

TABLE 3

| | Immunogenic | Expression (mg protein/ | |
|---|---|---|---|
| Strain(s) | Fragment | L CHO culture (±SD)) | |
| 3472 (SEQ ID NO: 75) | CTD_long_a | 77.3 | ⁽⁵⁾ |
| | (SEQ ID NO: 1) | | |
| 2356 (SEQ ID NO: 101) | CTD_long_b | 60.8 | ⁽⁵⁾ |
| | (SEQ ID NO: 7) | | |
| 2357 (SEQ ID NO: 103) | CTD_long_c | 60.8 | ⁽⁵⁾ |
| | (SEQ ID NO: 9) | | |
| 2358 (SEQ ID NO: 105) | CTD_long_d | 65.8 | ⁽⁵⁾ |
| | (SEQ ID NO: 11) | | |
| 2359 (SEQ ID NO: 107) | CTD_long_e | 96.1 | ⁽⁵⁾ |
| | (SEQ ID NO: 13) | | |
| 2360 (SEQ ID NO: 109) | CTD_long_f | 95.1 | ⁽⁵⁾ |
| | (SEQ ID NO: 15) | | |
| 2361 (SEQ ID NO: 111) | CTD_long_g | 74.5 | ⁽⁵⁾ |
| | (SEQ ID NO: 17) | | |
| 2362 (SEQ ID NO: 113) | CTD_long_h | 108.3 | ⁽⁵⁾ |
| | (SEQ ID NO: 19) | | |
| 2363 (SEQ ID NO: 115) | CTD_long_i | 108.5 | ⁽⁵⁾ |
| | (SEQ ID NO: 21) | | |
| 2330 (SEQ ID NO: 73) | CTD_short_a | >40 | ⁽⁵⁾ |
| | (SEQ ID NO: 23) | | |
| 2364 (SEQ ID NO: 117) | CTD_short_b | 131.8 | ⁽⁵⁾ |
| | (SEQ ID NO: 25) | | |
| 2365 (SEQ ID NO: 119) | CTD_short_c | 126.5 | ⁽⁵⁾ |
| | (SEQ ID NO: 27) | | |
| 2366 (SEQ ID NO: 121) | CTD_short_d | 106.2 | ⁽⁵⁾ |
| | (SEQ ID NO: 29) | | |
| 2367 (SEQ ID NO: 123) | CTD_short_e | 107.5 | ⁽⁵⁾ |
| | (SEQ ID NO: 31) | | |
| 2368 (SEQ ID NO: 125) | CTD_short_f | 109.9 | ⁽⁵⁾ |
| | (SEQ ID NO: 33) | | |
| 2369 (SEQ ID NO: 127) | CTD_short_g | 132.4 | ⁽⁵⁾ |
| | (SEQ ID NO: 35) | | |
| 2370 (SEQ ID NO: 129) | CTD_short_h | 67.5 | ⁽⁵⁾ |
| | (SEQ ID NO: 37) | | |
| 2371 (SEQ ID NO: 131) | CTD_short_i | 167.7 | ⁽⁵⁾ |
| | (SEQ ID NO: 39) | | |
| 2372 (SEQ ID NO: 133) | CTD_vs_a | 2.3 | ⁽⁵⁾ |
| | (SEQ ID NO: 41) | | |
| 2373 (SEQ ID NO: 135) | CTD_vs_b | 1.7 | ⁽⁵⁾ |
| | (SEQ ID NO: 43) | | |
| 2374 (SEQ ID NO: 137) | CTD_vs_c | 0.9 | ⁽⁵⁾ |
| | (SEQ ID NO: 45) | | |
| 2375 (SEQ ID NO: 139) | CTD_vs_d | ≤0.8 | ⁽⁵⁾ |
| | (SEQ ID NO: 47) | | ⁽⁵⁾ |
| 2376 (SEQ ID NO: 141) | CTD_vs_e | ≤0.8 | |
| | (SEQ ID NO: 49) | | |
| 2377 (SEQ ID NO: 143) | RBD_a | ≤0.8 | ⁽⁵⁾ |
| | (SEQ ID NO: 51) | | |
| 2378 (SEQ ID NO: 145) | RBD_b | ≤0.8 | ⁽⁵⁾ |
| | (SEQ ID NO: 53) | | |
| 2380 (SEQ ID NO: 149) | RBD_d | ≤0.8 | ⁽⁵⁾ |
| | (SEQ ID NO: 55) | | |
| 2381 (SEQ ID NO: 151) | RBD_e | 14.5 | ⁽⁵⁾ |
| | (SEQ ID NO: 57) | | |

[0158] As can be seen in Table 3 and FIGS. 1A-B, protein expression varies significantly depending on what immunogenic fragment the strain encodes. It was surprisingly found that the amino acid sequence of the endpoints of certain immunogenic fragments was associated with high protein expression, in some cases more than 100-fold higher expression than immunogenic fragments containing different amino acid endpoint sequences.

### Example 2

[0159] Expression construct CDS inserts were made by DNA synthesis and cloned into a C-terminal linker-Fc (human IgG1 Fc) expression vector. Transfection grade plasmid was prepared and used for transient transfection of ExpiCHO-S cells using the Mirus Bio CHOgro medium and transfection system. Transfection cultures were on the 25 mL scale. After 7-days of post-transfection culturing, protein was affinity purified from the cell medium using Protein A chromatography, washed extensively with PBS (pH 7.2), and eluted with low-pH sodium acetate elution followed by rapid neutralization with TRIS/HCl buffer, pH7.2. Eluted protein was analyzed by spectrophotometric absorbance of 280 nm light (data in table 4, graphed in FIGS. 4A, 41B, 6A, and 6B) and by reducing SDS-PAGE (shown in FIGS. 3A-D and 5A-C). All transfections, purifications, and SDS-PAGE sample load volumes were done with the same volumes and thus allow direct comparison of between samples. The starting protein is CTD-short_g, the sequence of which is [SEQ ID NO: 245]-[SEQ ID NO: 603]-[SEQ ID NO: 363]. For each N-terminal deletion listed in Table 4, i.e., CTD-g_N-1—CTD-g_N-47, the sequence of each tested immunogenic fragment is [the sequence corresponding to CTD-g_N-[#] as shown in Table 4]-[SEQ ID NO: 603]-[SEQ TD NO: 363]. For each C-terminal deletion, i.e., CTD-g_C-2—CTD-g_C-38, the sequence ofeach tested immunogenic fragment is [SEQ TD NO: 245]-[SEQ ID NO: 603]-[the sequence corresponding to CTD-g_C-[#] as shown in Table 4].

TABLE 4

| | Protein Name | | | Protein Name | |
|---|---|---|---|---|---|
| | (SEQ ID NO of | | | (SEQ ID NO of | |
| | corresponding N- | A280 | | corresponding C- | A280 |
| Note | terminus region) | (Nanodrop) | Note | terminus region) | (Nanodrop) |
| Start | CTD-g (SEQ ID | 0.35 | C-terminal | CTD-g_C-2 (SEQ | 0.359 |
| Protein | NO: 245) | | deletions | ID NO 365) | |
| (CTD- | | | | | |
| short_g); | | | | | |
| RBD N- | | | | | |
| terminus | | | | | |
| for Ren, et | | | | | |
| al., Nature, | | | | | |
| 2020 | | | | | |
| N-terminal | CTD-g_N-1 (SEQ | 0.296 | | CTD-g_C-3 (SEQ | 0.233 |
| deletions | ID NO: 246) | | | ID NO: 366) | |
| | CTD-g_N-2 (SEQ | 0.425 | | CTD-g_C-5 (SEQ | 0 |
| | ID NO: 247) | | | ID NO: 368) | |
| | CTD-g_N-3 (SEQ | 0.298 | | CTD-g_C-6 (SEQ | 0.683 |
| | ID NO: 248) | | | ID NO: 369) | |
| | CTD-g_N-4 (SEQ | 0 | | CTD-g_C-7 (SEQ | 0.659 |
| | ID NO: 249) | | | ID NO: 370) | |
| | CTD-g_N-5 (SEQ | 0.574 | | CTD-g_C-10 | 0.564 |
| | ID NO: 250) | | | (SEQ ID NO: 373) | |
| | CTD-g_N-6 (SEQ | 0.4 | | CTD-g_C-11 | 0.792 |
| | ID NO: 251) | | | (SEQ ID NO: 374) | |
| | CTD-g_N-7 (SEQ | 0.126 | | CTD-g_C-12 | 0.168 |
| | ID NO: 252) | | | (SEQ ID NO: 375) | |
| | CTD-g_N-8 (SEQ | 0.065 | | CTD-g_C-13 | 0.69 |
| | ID NO: 253) | | | (SEQ ID NO: 376) | |
| | CTD-g_N-9 (SEQ | 0 | | CTD-g_C-14 | 0.48 |
| | ID NO: 254) | | | (SEQ ID NO: 377) | |
| | CTD-g_N-10 | 0.428 | | CTD-g_C-15 | 0.725 |
| | (SEQ ID NO: 255) | | | (SEQ ID NO: 378) | |
| | CTD-g_N-11 | 0.261 | | CTD-g_C-16 | 0.627 |
| | (SEQ ID NO: 256) | | | (SEQ ID NO: 379) | |
| N-terminus | CTD-g_N-12 | 0.434 | | CTD-g_C-17 | 0.792 |
| of CTD- | (SEQ ID NO: 257) | | | (SEQ ID NO: 380) | |
| short_i | | | | | |
| | CTD-g_N-13 | 0.67 | | CTD-g_C-19 | 0.114 |
| | (SEQ ID NO: 258) | | | (SEQ ID NO: 382) | |
| | CTD-g_N-15 | 0.354 | | CTD-g_C-20 | 0.558 |
| | (SEQ ID NO: 260) | | | (SEQ ID NO: 383) | |
| | CTD-g_N-16 | 0.253 | | CTD-g_C-21 | 0.861 |
| | (SEQ ID NO: 261) | | | (SEQ ID NO: 384) | |
| | CTD-g_N-18 | 0 | | CTD-g_C-22 | 0.764 |
| | (SEQ ID NO: 263) | | | (SEQ ID NO: 385) | |
| | CTD-g_N-19 | 0.03 | | CTD-g_C-23 | 0.968 |
| | (SEQ ID NO: 264) | | | (SEQ ID NO: 386) | |
| | CTD-g_N-20 | 0 | | CTD-g_C-24 | 0.872 |
| | (SEQ ID NO: 265) | | | (SEQ ID NO: 387) | |
| | CTD-g_N-22 | 0 | | CTD-g_C-25 | 0.964 |
| | (SEQ ID NO: 267) | | | (SEQ ID NO: 388) | |
| | CTD-g_N-23 | 0 | | CTD-g_C-26 | 1.164 |
| | (SEQ ID NO: 268) | | | (SEQ ID NO: 389) | |
| | CTD-g_N-24 | 0 | C-terrminus of | CTD-g_C-27 | 1.315 |
| | (SEQ ID NO: 269) | | RBD (Ren, et | (SEQ ID NO: 390) | |
| | | | al., Nature, | | |
| | | | 2020) | | |
| | CTD-g_N-25 | 0 | | CTD-g_C-28 | 1.255 |
| | (SEQ ID NO: 270) | | | (SEQ ID NO: 391) | |
| | CTD-g_N-27 | 0 | | CTD-g_C-29 | 1.295 |
| | (SEQ ID NO: 272) | | | (SEQ ID NO: 392) | |
| | CTD-g_N-28 | 0.013 | | CTD-g_C-30 | 1.268 |
| | (SEQ ID NO: 273) | | | (SEQ ID NO: 393) | |
| | CTD-g_N-30 | 0 | C-terminus of | CTD-g_C-31 | 1.44 |
| | (SEQ ID NO: 275) | | CTD-short_i | (SEQ ID NO: 394) | |
| | CTD-g_N-32 | 0 | | CTD-g_C-32 | 1.015 |
| | (SEQ ID NO: 277) | | | (SEQ ID NO: 395) | |
| | CTD-g_N-33 | 0 | | CTD-g_C-33 | 1.38 |
| | (SEQ ID NO: 278) | | | (SEQ ID NO: 396) | |
| | CTD-g_N-35 | 0 | | CTD-g_C-34 | 1.427 |
| | (SEQ ID NO: 280) | | | (SEQ ID NO: 397) | |
| | CTD-g_N-36 | 0.037 | | CTD-g_C-35 | 1.206 |
| | (SEQ ID NO: 281) | | | (SEQ ID NO: 398) | |
| | CTD-g_N-37 | 0 | | CTD-g_C-37 | 1.241 |
| | (SEQ ID NO: 282) | | | (SEQ ID NO: 400) | |
| | CTD-g_N-38 | 0 | | CTD-g_C-38 | 1.217 |
| | (SEQ ID NO: 283) | | | (SEQ ID NO: 401) | |
| | CTD-g_N-40 | 0.046 | | | |
| | (SEQ ID NO: 285) | | | | |
| | CTD-g_N-41 | 0 | Transfection Controls | | |
| | (SEQ ID NO: 286) | | | | |
| | CTD-g_N-42 | 0 | Round 2 | CTD-g_N-5 (SEQ | 0.664 |
| | (SEQ ID NO: 287) | | | ID NO: 250) | |
| | CTD-g_N-43 | 0.023 | Round 3 | CTD-g_N-5 (SEQ | 0.477 |
| | (SEQ ID NO: 288) | | | ID NO: 250) | |
| | CTD-g_N-44 | 0.057 | Round 4 | CTD-g_N-5 (SEQ | 0.392 |
| | (SEQ ID NO: 289) | | | ID NO: 250) | |
| | CTD-g_N-45 | 0.073 | | | |
| | (SEQ ID NO: 290) | | | | |
| | CTD-g_N-47 | 0.073 | | | |
| | (SEQ ID NO: 292) | | | | |

### Example 3

[0160] The expression constructs shown in FIG. 7 were prepared and analyzed in accordance with the protocol used in Example 2, with the exception that the transfected cells were either CHO-S or ExpiCHO cells, as shown in the figure. Particularly, the constructs analyzed were CTD-short_g (Wuhan) (the sequence of which is [SEQ ID NO: 245]-[SEQ ID NO: 603]-[SEQ ID NO: 363]), and CTD-short_i (Wuhan) (the sequence of which is [SEQ ID NO: 257]—[SEQ ID NO: 603]-[SEQ ID NO: 394]), both of which were grown in CHO-S cells. CTD-short_i (BA.4/5) (the sequence of which is [SEQ ID NO: 257]—[SEQ ID NO: 2047]-[SEQ ID NO: 394]); CTD-short_i (BQ.1.1) (the sequence of which is [SEQ ID NO: 257]—[SEQ ID NO: 2045]-[SEQ ID NO: 394]); CTD-short_i (BA.2.75) (the sequence of which is [SEQ ID NO: 257]-[SEQ ID NO: 2048]-[SEQ ID NO: 394]); CTD-short_i (BA.2.75.2) (the sequence of which is [SEQ ID NO: 257]—[SEQ ID NO: 2049]-[SEQ ID NO: 394]); CTD-short_i (BA.4.6) (the sequence of which is [SEQ ID NO: 257]—[SEQ ID NO: 2050]-[SEQ ID NO: 394]); and CTD-short_i (XBB) (the sequence of which is [SEQ ID NO: 257]—[SEQ ID NO: 2046]-[SEQ ID NO: 394]), were all grown in ExpiCHO cells. As can be seen in FIG. 7, CTD-short_i ends allow for stable expression of the resulting fragment. SARS-CoV-2 Spike RBD-containing regions with ends defined by CTD-short g and CTD-short_i exhibit differential expressibility and stability, insofar as CTD-short_i constructs demonstrate superior stability to CTD-short_g constructs independent of which variant, e.g., BA.4/5, BQ.1.1, and XBB, the CTD-short_i construct contains.

### Example 4

[0161] The expression constructs shown in FIGS. 8A-E and Table 5 below were prepared and analyzed in accordance with the protocol used in Example 2, with the exception that the constructs were cultured in CHO cells for 6 days rather than 7. The sequence of each construct is as follows: [“N-term” sequence]-[“Intervening Sequence” ]-[“C-term” sequence]. For example, the sequence of Construct 1 is the combined sequence of SEQ ID NO: 249-SEQ ID NO: 603-SEQ ID NO: 368.

[0162] As can be seen in Table 5, superior expression is seen in constructs with an N-terminus between N-4 and N-13 and a C-terminus between C-19 and C-34. When the endpoints are both within these ranges, then expression is surprisingly and substantially increased in comparison to when either endpoint is outside of these ranges, e.g., when the C-terminus is C-5.

TABLE 5

| | | Intervening | C-term | |
|---|---|---|---|---|
| | | Sequence | (SEQ | |
| Construct | N-term | (SEQ ID NO | ID NO | |
| No. in | (SEQ ID NO | for AA | for AA | |
| Figure | for AA seq.) | seq.) | seq.) | A280 nm |
| 1 | N-4 (249) | 603 | C-5 (368) | 0.478 |
| 2 | N-4 (249) | 603 | C-19 (382) | 0.615 |
| 3 | N-4 (249) | 603 | C-22 (385) | 0.858 |
| 4 | N-4 (249) | 603 | C-27 (390) | 1.061 |
| 5 | N-4 (249) | 603 | C-31 (394) | 1.438 |
| 6 | N-4 (249) | 603 | C-34 (397) | 0.988 |
| 7 | N-5 (250) | 603 | C-5 (368) | 0.313 |
| 8 | N-5 (250) | 603 | C-19 (382) | 1.038 |
| 9 | N-5 (250) | 603 | C-22 (385) | 0.810 |
| 10 | N-5 (250) | 603 | C-27 (390) | 0.894 |
| 11 | N-5 (250) | 603 | C-31 (394) | 0.948 |
| 12 | N-5 (250) | 603 | C-34 (397) | 0.983 |
| 13 | N-6 (251) | 603 | C-5 (368) | 0.485 |
| 14 | N-6 (251) | 603 | C-19 (382) | 1.278 |
| 15 | N-6 (251) | 603 | C-22 (385) | 1.168 |
| 17 | N-6 (251) | 603 | C-31 (394) | 1.589 |
| 18 | N-6 (251) | 603 | C-34 (397) | 0.751 |
| 19 | N-8 (253) | 603 | C-5 (368) | 0.668 |
| 20 | N-8 (253) | 603 | C-19 (382) | 1.338 |
| 21 | N-8 (253) | 603 | C-22 (385) | 0.953 |
| 22 | N-8 (253) | 603 | C-27 (390) | 1.408 |
| 23 | N-8 (253) | 603 | C-31 (394) | 1.239 |
| 24 | N-8 (253) | 603 | C-34 (397) | 0.911 |
| 25 | N-12 (257) | 603 | C-5 (368) | 0.681 |
| 26 | N-12 (257) | 603 | C-19 (382) | 1.176 |
| 27 | N-12 (257) | 603 | C-22 (385) | 1.053 |
| 28 | N-12 (257) | 603 | C-27 (390) | 1.596 |
| 29 | N-12 (257) | 603 | C-31 (394) | 1.540 |
| 30 | N-12 (257) | 603 | C-34 (397) | 1.844 |
| 31 | N-13 (258) | 603 | C-5 (368) | 0.849 |
| 32 | N-13 (258) | 603 | C-19 (382) | 1.418 |
| 33 | N-13 (258) | 603 | C-22 (385) | 1.440 |
| 34 | N-13 (258) | 603 | C-27 (390) | 1.768 |
| 35 | N-13 (258) | 603 | C-31 (394) | 1.889 |
| 36 | N-13 (258) | 603 | C-34 (397) | 1.328 |

BQ.1.1

| | | | | |
|---|---|---|---|---|
| R1 | N-12 (257) | 2045 | C-31 (394) | 2.730 |
| R2 | N-12 (257) | 2045 | C-34 (397) | 2.700 |
| R3 | N-13 (258) | 2045 | C-31 (394) | 2.535 |
| R4 | N-13 (258) | 2045 | C-34 (397) | 2.166 |

XBB

| | | | | |
|---|---|---|---|---|
| B1 | N-12 (257) | 2046 | C-31 (394) | 0.988 |
| B2 | N-12 (257) | 2046 | C-34 (397) | 1.271 |
| B3 | N-13 (258) | 2046 | C-31 (394) | 1.018 |
| B4 | N-13 (258) | 2046 | C-34 (397) | 1.214 |

TABLE 6

| SEQ | | |
|---|---|---|
| ID | | |
| NO: | Description | Sequence |
| 2045 | BQ.1.1 | VLYNFAPFFAFKCYGVSPTKLNDLCFTNVYADSFVIRGNEVSQIA |
| | Intervening | PGQTGNIADYNYKLPDDFTGCVIAWNSNKLDSTVGGNYNYRYRLF |
| | Sequence | RKSKLKPFERDISTEIYQAGNKPCNGVAGVNCYFPLQSYGFRPTY |
| | (AA) | GVGHQPYRVVVLSFELLHAPATVCGPKK |
| 2046 | XBB | VLYNFAPFFAFKCYGVSPTKLNDLCFTNVYADSFVIRGNEVSQIA |
| | Intervening | PGQTGNIADYNYKLPDDFTGCVIAWNSNKLDSKPSGNYNYRYRLF |
| | Sequence | RKSKLKPFERDISTEIYQAGNKPCNGVAGSNCYSPLQSYGFRPTY |
| | (AA) | GVGHQPYRVVVLSFELLHAPATVCGPKK |
| 2047 | BA.4/5 | VLYNFAPFFAFKCYGVSPTKLNDLCFTNVYADSFVIRGNEVSQIA |
| | Intervening | PGQTGNIADYNYKLPDDFTGCVIAWNSNKLDSKVGGNYNYRYRLF |
| | Sequence | RKSNLKPFERDISTEIYQAGNKPCNGVAGVNCYFPLQSYGFRPTY |
| | (AA) | GVGHQPYRVVVLSFELLHAPATVCGPKK |
| 2048 | BA.2.75 | VLYNFAPFFAFKCYGVSPTKLNDLCFTNVYADSFVIRGNEVSQIA |
| | Intervening | PGQTGNIADYNYKLPDDFTGCVIAWNSNKLDSKVSGNYNYLYRLF |
| | Sequence | RKSKLKPFERDISTEIYQAGNKPCNGVAGFNCYFPLQSYGFRPTY |
| | (AA) | GVGHQPYRVVVLSFELLHAPATVCGPKK |
| 2049 | BA 2.75.2 | VLYNFAPFFAFKCYGVSPTKLNDLCFTNVYADSFVIRGNEVSQIA |
| | Intervening | PGQTGNIADYNYKLPDDFTGCVIAWNSNKLDSKVSGNYNYLYRLF |
| | Sequence | RKSKLKPFERDISTEIYQAGNKPCNGVAGSNCYFPLQSYGFRPTY |
| | (AA) | GVGHQPYRVVVLSFELLHAPATVCGPKK |
| 2050 | BA 4.6 | VLYNFAPFFAFKCYGVSPTKLNDLCFTNVYADSFVIRGNEVSQIA |
| | Intervening | PGQTGNIADYNYKLPDDFTGCVIAWNSNKLDSKVGGNYNYRYRLF |
| | Sequence | RKSNLKPFERDISTEIYQAGNKPCNGVAGVNCYFPLQSYGFRPTY |
| | (AA) | GVGHQPYRVVVLSFELLHAPATVCGPKK |
| 2051 | BQ.1.1 | GTACTTTATAACTTCGCTCCCTTTTTCGCTTTCAAATGTTACGGA |
| | Intervening | GTGAGCCCTACAAAATTGAACGATCTCTGCTTCACCAACGTCTAT |
| | Sequence | GCAGACAGTTTTGTTATCCGTGGCAATGAAGTGAGCCAGATTGCA |
| | (Nucl.) | CCCGGTCAAACTGGGAACATTGCCGACTATAACTACAAACTTCCC |
| | | GACGACTTCACAGGGTGTGTAATCGCTTGGAACAGCAATAAACTC |
| | | GACTCTACCGTTGGAGGAAACTACAATTATCGCTACCGCCTTTTC |
| | | CGGAAGTCTAAACTCAAGCCCTTTGAGCGGGACATTAGCACTGAG |
| | | ATATATCAGGCAGGTAACAAACCATGCAATGGAGTAGCTGGTGTA |
| | | AACTGCTATTTCCCACTTCAGTCATACGGATTTAGACCCACATAC |
| | | GGTGTTGGACACCAACCATATCGTGTGGTTGTGCTCAGTTTTGAA |
| | | CTCCTTCATGCCCCTGCCACCGTGTGTGGGCCTAAAAAG |
| 2052 | XBB | GTTTTGTATAACTTCGCCCCCTTCTTCGCATTCAAGTGTTATGGC |
| | Intervening | GTCAGCCCAACCAAGCTTAATGACCTCTGTTTTACAAACGTCTAC |
| | Sequence | GCTGATAGCTTCGTGATACGTGGTAATGAAGTAAGTCAAATAGCC |
| | (Nucl.) | CCTGGCCAGACTGGTAACATTGCAGACTACAATTATAAACTTCCA |
| | | GATGACTTTACTGGGTGTGTAATCGCTTGGAATAGTAATAAGCTC |
| | | GACTCTAAGCCCTCCGGGAATTACAACTACCGATATCGGCTTTTC |
| | | AGAAAGTCTAAGCTCAAACCATTTGAGCGCGACATAAGCACAGAG |
| | | ATATATCAAGCAGGCAATAAGCCTTGTAACGGCGTAGCTGGTAGT |
| | | AATTGTTACTCCCCCCTGCAAAGTTATGGGTTCAGGCCAACTTAT |
| | | GGGGTGGGGCACCAGCCCTACAGAGTTGTCGTACTGAGCTTTGAG |
| | | CTGCTCCATGCTCCAGCTACAGTGTGTGGACCCAAGAAA |
| 2053 | BA.4/5 | GTGCTCTACAACTTCGCACCTTTCTTCGCTTTCAAGTGTTACGGT |
| | Intervening | GTTTCCCCCACTAAACTTAATGATCTGTGCTTTACTAACGTGTAC |
| | Sequence | GCAGACTCATTCGTTATTCGGGGTAACGAGGTTTCCCAAATCGCT |
| | (Nucl.) | CCCGGTCAAACCGGAAACATCGCTGATTACAACTATAAGTTGCCT |
| | | GATGACTTTACTGGGTGTGTCATCGCATGGAATTCCAACAAACTG |
| | | GATAGTAAAGTTGGAGGTAACTACAATTACCGATACAGGCTTTTC |
| | | CGTAAATCCAATCTGAAGCCCTTCGAGCGCGATATTAGTACTGAA |
| | | ATATATCAGGCTGGTAATAAACCTTGCAATGGGGTGGCTGGAGTA |
| | | AACTGCTACTTTCCTCTTCAGAGTTACGGGTTCAGGCCCACCTAT |
| | | GGAGTCGGACATCAACCATACCGTGTGGTTGTACTGTCATTTGAA |
| | | CTCCTTCACGCTCCCGCTACCGTGTGCGGCCCAAAGAAA |
| 2054 | BA.2.75 | GTTCTTTACAATTTCGCTCCCTTTTTCGCCTTCAAGTGTTATGGG |
| | Intervening | GTCTCTCCTACTAAACTCAATGACCTGTGCTTTACCAATGTGTAC |
| | Sequence | GCCGATTCCTTCGTTATACGAGGGAATGAGGTAAGTCAAATAGCC |
| | (Nucl.) | CCTGGACAAACCGGCAACATTGCTGATTACAATTACAAACTGCCT |
| | | GACGATTTCACCGGTTGTGTAATAGCCTGGAATTCCAATAAACTG |
| | | GATTCTAAAGTATCAGGCAACTACAACTATCTTTACAGGTTGTTT |
| | | AGAAAAAGCAAGCTGAAGCCCTTCGAGCGCGATATTTCAACAGAG |
| | | ATATATCAAGCAGGAAATAAACCATGCAACGGCGTCGCCGGCTTC |
| | | AATTGCTACTTCCCTTTGCAAAGTTATGGTTTTCGACCTACATAC |
| | | GGTGTCGGTCATCAGCCCTACCGCGTGGTCGTCCTGTCCTTTGAA |
| | | CTTCTTCACGCCCCAGCCACCGTATGTGGTCCCAAGAAG |
| 2055 | BA 2.75.2 | GTGCTCTACAATTTTGCACCCTTTTTCGCCTTCAAGTGTTACGGT |
| | Intervening | GTGAGCCCTACTAAGTTGAATGACCTCTGTTTTACAAATGTGTAC |
| | Sequence | GCTGACTCATTCGTGATACGTGGTAACGAAGTGAGTCAAATAGCC |
| | (Nucl.) | CCTGGGCAAACAGGTAACATCGCTGACTATAACTACAAGTTGCCC |
| | | GACGATTTTACAGGGTGTGTTATAGCATGGAACAGTAACAAGCTC |
| | | GATTCAAAGGTGAGCGGAAATTACAACTACCTCTATCGACTCTTT |
| | | AGGAAATCCAAGCTCAAGCCATTCGAGAGAGATATATCAACCGAA |
| | | ATTTACCAGGCTGGTAACAAGCCATGCAATGGGGTCGCAGGATCC |
| | | AACTGTTATTTCCCATTGCAGTCATACGGCTTCAGGCCCACTTAT |
| | | GGGGTAGGTCATCAACCCTACCGGGTCGTCGTCCTTTCTTTTGAA |
| | | CTTCTGCACGCACCAGCCACCGTATGCGGCCCCAAGAAG |
| 2056 | BA 4.6 | GTGCTCTATAACTTCGCTCCCTTCTTTGCTTTTAAATGCTACGGA |
| | Intervening | GTCTCCCCTACAAAGCTGAACGACCTTTGCTTCACTAATGTCTAC |
| | Sequence | GCCGATAGCTTTGTTATCAGAGGAAATGAAGTATCACAGATCGCA |
| | (Nucl.) | CCAGGTCAGACAGGCAACATCGCAGACTATAACTATAAACTTCCC |
| | | GACGATTTTACTGGCTGTGTCATTGCTTGGAACTCAAATAAACTC |
| | | GACTCAAAGGTGGGAGGAAATTACAACTATCGTTATAGGCTGTTC |
| | | AGGAAAAGTAATCTCAAGCCATTCGAGCGAGACATTAGTACAGAG |
| | | ATTTACCAGGCTGGAAACAAACCTTGCAATGGTGTCGCAGGCGTC |
| | | AACTGCTACTTCCCATTGCAGAGCTACGGCTTCAGGCCAACATAC |
| | | GGTGTGGGACACCAGCCTTACCGAGTTGTGGTCCTGTCCTTTGAA |
| | | CTTCTCCACGCACCTGCTACCGTCTGTGGACCCAAAAAA |
| 2057 | BA.X-1- | NITNLCPFDEVFNATKFASVYAWNRKRISNCVADYSVLYNSASFS |
| | monomer | AFKCYGVSPTKLNDLCFTNVYADSFVIRGNEVSQIAPGQTGNIAD |
| | (AA) | YNYKLPDDFTGCVIAWNSNKLDSKVGGNYNYRYRLFRKSNLKPFE |
| | | RDISTEIYQAGNKPCNGVAGENCYFPLRSYGFRPTYGVGHQPYRV |
| | | VVLSFELLHAPATVCGPKKSTNLVKNK |
| 2058 | BA.X-2- | NITNLCPFDEVFNATRFASVYAWNRKRISNCVADYSVLYNSAPFS |
| | monomer | AFKCYGVSPTKLNDLCFTNVYADSFVIRGNEVSQIAPGQTGNIAD |
| | (AA) | YNYKLPDDFTGCVIAWNSNKLDSKVGGNYNYLYRLFRKSNLKPFE |
| | | RDISTEIYQAGNKPCNGVAGENCYFPLRSYGFRPTYGVGHQPYRV |
| | | VVLSFELLHAPATVCGPKKSTNLVKNK |
| 2059 | BA.X-3- | NITNLCPFDEVFNATRFASVYAWNRKRISNCVADYSVLYNFAPFF |
| | monomer | AFKCYGVSPTKLNDLCFTNVYADSFVIRGNEVSQIAPGQTGNIAD |
| | (AA) | YNYKLPDDFTGCVIAWNSNKLDSKVGGNYNYRYRLFRKSNLKPFE |
| | | RDISTEIYQAGNKPCNGVAGENCYFPLRSYGFRPTYGVGHQPYRV |
| | | VVLSFELLHAPATVCGPKKSTNLVKNK |
| 2060 | BA.X-4- | NITNLCPFDEVFNATRFASVYAWNRKRISNCVADYSVLYNSASFS |
| | monomer | AFKCYGVSPTKLNDLCFTNVYADSFVIRGNEVSQIAPGQTGNIAD |
| | (AA) | YNYKLPDDFTGCVIAWNSNKLDSKVGGNYNYRYRLFRKSNLKPFE |
| | | RDISTEIYQAGNKPCNGVKGFNCYFPLRSYGFRPTYGVGHQPYRV |
| | | VVLSFELLHAPATVCGPKKSTNLVKNK |
| 2061 | BA.X-5- | NITNLCPFDEVFNATRFASVYAWNRKRISNCVADYSVLYNFAPFF |
| | monomer | AFKCYGVSPTKLNDLCFTNVYADSFVIRGNEVSQIAPGQTGNIAD |
| | (AA) | YNYKLPDDFTGCVIAWNSNKLDSKVGGNYNYRYRLFRKSNLKPFE |
| | | RDISTEIYQAGNKPCNGVKGFNCYFPLRSYGFQPTYGVGHQPYRV |
| | | VVLSFELLHAPATVCGPKKSTNLVKNK |
| 2062 | BA.X-6- | NITNLCPFDEVFNATRFASVYAWNRKRISNCVADYSVLYNSASFS |
| | monomer | AFKCYGVSPTKLNDLCFTNVYADSFVIRGNEVSQIAPGQTGNIAD |
| | (AA) | YNYKLPDDFTGCVIAWNSNKLDSKVGGNYNYLYRLFRKSNLKPFE |
| | | RDISTEIYQAGNKPCNGVAGENCYFPLQSYGFQPTYGVGYQPYRV |
| | | VVLSFELLHAPATVCGPKKSTNL VKNK |
| 2063 | BA.X-7- | NITNLCPFDEVFNATRFASVYAWNRKRISNCVADYSVLYNFAPFF |
| | monomer | AFKCYGVSPTKLNDLCFTNVYADSFVIRGNEVSQIAPGQTGNIAD |
| | (AA) | YNYKLPDDFTGCVIAWNSNKLDSKVGGNYNYLYRLFRKSNLKPFE |
| | | RDISTEIYQAGNKPCNGVAGENCYFPLRSYGFRPTYGVGHQPYRV |
| | | VVLSFELLHAPATVCGPKKSTNLVKNK |
| 2064 | BA.X-8- | NITNLCPFDEVFNATRFASVYAWNRKRISNCVADYSVLYNLASFS |
| | monomer | TFKCYGVSPTKLNDLCFTNVYADSFVIRGDEVRQIAPGQTGNIAD |
| | (AA) | YNYKLPDDFTGCVIAWNSNKLDSKVSGNYNYLYRLFRKSNLKPFE |
| | | RDISTEIYQAGNKPCNGVAGFNCYFPLRSYSFRPTYGVGHQPYRV |
| | | VVLSFELLHAPATVCGPKKSTNL VKNK |
| 2065 | BA.X-9- | NITNLCPFDEVFNATKFASVYAWNRKRISNCVADYSVLYNSASFS |
| | monomer | AFKCYGVSPTKLNDLCFTNVYADSFVIRGNEVSQIAPGQTGNIAD |
| | (AA) | YNYKLPDDFTGCVIAWNSNKLDSKVSGNYNYRYRLFRKSNLKPFE |
| | | RDISTEIYQAGNKPCNGVKGFNCYFPLRSYSFRPTYGVGHQPYRV |
| | | VVLSFELLHAPATVCGPKKSTNL VKNK |
| 2066 | BA.X-10- | NITNLCPFDEVFNATRFASVYAWNRKRISNCVADYSVLYNSAPFS |
| | monomer | AFKCYGVSPTKLNDLCFTNVYADSFVIRGNEVSQIAPGQTGNIAD |
| | (AA) | YNYKLPDDFTGCVIAWNSNKLDSKVGGNYNYRYRLFRKSNLKPFE |
| | | RDISTEIYQAGNKPCNGVAGFNCYFPLRSYGFRPTYGVGHQPYRV |
| | | VVLSFELLHAPATVCGPKKSTNLVKNK |
| 2067 | BA.X-1- | AATATCACAAATCTCTGCCCATTTGACGAAGTATTTAACGCCACC |
| | monomer | AAGTTTGCTTCAGTCTATGCTTGGAACCGGAAAAGGATTTCTAAT |
| | (Nucl.) | TGTGTAGCCGACTATAGTGTCCTCTACAATTCCGCCTCATTTTCA |
| | | GCCTTTAAATGCTACGGTGTATCACCTACTAAGCTCAACGATTTG |
| | | TGTTTTACAAACGTGTATGCTGATTCCTTTGTGATTCGTGGCAAC |
| | | GAAGTTTCTCAGATAGCCCCTGGTCAGACTGGCAACATTGCAGAT |
| | | TACAACTATAAACTGCCAGATGACTTTACTGGGTGTGTTATAGCC |
| | | TGGAATAGTAATAAACTTGACTCAAAAGTCGGTGGGAACTATAAC |
| | | TATCGTTATCGACTCTTTCGTAAATCAAACCTGAAGCCTTTCGAG |
| | | AGAGATATATCTACAGAGATTTACCAAGCTGGTAACAAACCTTGC |
| | | AACGGAGTAGCTGGCTTTAATTGTTATTTCCCTCTGCGTTCCTAT |
| | | GGTTTTCGACCAACCTACGGGGTGGGTCATCAGCCATACCGGGTC |
| | | GTAGTGCTGAGCTTCGAACTGTTGCACGCCCCTGCAACCGTGTGC |
| | | GGCCCTAAAAAGTCAACTAACCTGGTTAAGAATAAG |
| 2068 | BA.X-2- | AACATCACTAATCTGTGCCCTTTTGACGAGGTGTTCAACGCAACC |
| | monomer | CGATTTGCCTCAGTCTATGCATGGAACAGAAAGCGCATCAGTAAC |
| | (Nucl.) | TGCGTTGCCGATTATAGCGTTTTGTATAACTCTGCACCATTCTCT |
| | | GCATTCAAGTGTTATGGTGTGTCACCTACAAAGCTCAATGACCTT |
| | | TGTTTCACCAATGTGTATGCTGACTCTTTTGTGATCCGAGGGAAC |
| | | GAGGTAAGTCAGATTGCACCCGGACAGACCGGTAATATTGCTGAC |
| | | TACAATTACAAATTGCCAGATGACTTTACAGGATGCGTCATTGCT |
| | | TGGAACTCCAACAAGCTCGATAGCAAAGTGGGGGGGAATTATAAC |
| | | TATCTTTATCGACTGTTCCGTAAGTCAAATTTGAAACCATTTGAG |
| | | CGCGATATAAGTACAGAGATTTACCAGGCAGGGAACAAGCCTTGC |
| | | AACGGGGTCGCTGGTTTTAATTGTTACTTCCCTCTGAGGAGTTAT |
| | | GGATTTCGTCCAACATATGGTGTGGGCCATCAACCATACCGAGTT |
| | | GTAGTCCTTAGTTTCGAGTTGCTCCATGCTCCAGCCACAGTTTGT |
| | | GGCCCCAAAAAAAGCACCAACCTTGTAAAGAACAAG |
| 2069 | BA.X-3- | AACATTACCAACCTGTGTCCCTTCGACGAGGTCTTCAACGCAACA |
| | monomer | CGGTTCGCCTCAGTCTATGCTTGGAACCGAAAACGTATCTCCAAC |
| | (Nucl.) | TGCGTCGCAGACTATAGCGTCTTGTACAATTTCGCTCCTTTTTTC |
| | | GCATTTAAGTGCTACGGCGTGTCCCCAACTAAATTGAATGACTTG |
| | | TGTTTTACTAATGTGTATGCTGACTCCTTCGTAATTCGCGGTAAC |
| | | GAGGTATCCCAGATAGCACCTGGTCAGACCGGCAACATAGCCGAT |
| | | TATAACTACAAACTGCCTGATGATTTTACCGGATGTGTGATCGCT |
| | | TGGAATTCCAATAAACTTGACAGTAAAGTTGGAGGCAATTACAAT |
| | | TATCGCTATAGACTGTTCAGAAAAAGTAATTTGAAGCCTTTTGAA |
| | | AGAGACATTAGTACAGAGATATACCAAGCCGGAAATAAACCTTGT |
| | | AACGGCGTTGCAGGGTTTAATTGTTACTTCCCCCTGCGATCATAC |
| | | GGGTTTCGTCCAACCTATGGGGTAGGGCACCAACCTTACAGAGTA |
| | | GTTGTTCTGAGTTTTGAGCTCTTGCACGCACCTGCTACAGTTTGC |
| | | GGACCCAAGAAATCCACAAATTTGGTGAAGAATAAG |
| 2070 | BA.X-4- | AATATAACCAATCTCTGTCCTTTCGACGAAGTTTTCAACGCCACT |
| | monomer | CGGTTTGCCTCTGTGTATGCATGGAATCGAAAAAGAATTTCAAAT |
| | (Nucl.) | TGCGTGGCCGATTACTCTGTTCTTTACAACAGTGCATCCTTCTCC |
| | | GCTTTCAAATGTTATGGAGTGAGTCCAACCAAGCTTAATGATCTT |
| | | TGCTTCACCAACGTCTATGCAGACTCATTTGTTATACGTGGGAAT |
| | | GAAGTTTCTCAGATCGCCCCTGGACAGACCGGCAACATTGCAGAC |
| | | TACAATTACAAGCTGCCTGATGATTTTACAGGTTGCGTAATCGCC |
| | | TGGAACTCAAACAAGCTCGATTCCAAAGTAGGGGGGAATTACAAC |
| | | TACAGATACCGATTGTTTCGTAAAAGCAATCTGAAACCTTTTGAG |
| | | CGTGATATTTCTACTGAAATTTACCAAGCTGGAAATAAGCCTTGT |
| | | AATGGGGTTAAGGGATTTAATTGTTACTTCCCTTTGAGGTCTTAC |
| | | GGTTTCCGCCCCACTTATGGCGTAGGACACCAACCATATCGGGTG |
| | | GTGGTCCTTTCATTCGAGCTGCTGCACGCACCAGCAACTGTTTGC |
| | | GGACCAAAGAAGTCAACCAACCTGGTTAAAAATAAA |
| 2071 | BA.X-5- | AACATTACAAACCTGTGTCCTTTTGACGAGGTGTTCAATGCTACT |
| | monomer | CGGTTCGCATCCGTTTATGCATGGAACCGTAAACGCATCTCAAAT |
| | (Nucl.) | TGTGTCGCCGACTACTCAGTGCTCTACAACTTTGCCCCATTCTTT |
| | | GCATTTAAGTGTTACGGTGTATCACCCACCAAGCTCAACGACCTC |
| | | TGCTTCACTAACGTTTATGCCGATTCCTTTGTGATAAGGGGCAAC |
| | | GAAGTGAGCCAAATCGCCCCCGGACAAACTGGTAACATCGCCGAT |
| | | TATAATTATAAACTTCCCGACGACTTTACTGGGTGCGTGATAGCA |
| | | TGGAACTCAAACAAACTCGATTCCAAGGTCGGCGGTAATTATAAT |
| | | TATCGGTATAGGCTCTTCCGTAAGTCTAATCTCAAACCTTTCGAA |
| | | CGGGATATTTCAACAGAGATTTATCAGGCTGGGAATAAACCATGT |
| | | AACGGAGTAAAGGGCTTCAACTGTTACTTTCCCCTTCGAAGCTAC |
| | | GGTTTCCAGCCAACCTACGGGGTGGGCCACCAGCCCTACCGTGTA |
| | | GTCGTCCTTAGCTTCGAGTTGCTCCATGCCCCAGCCACTGTGTGC |
| | | GGACCAAAGAAGAGCACCAATCTTGTTAAGAATAAG |
| 2072 | BA.X-6- | AATATCACAAATCTCTGTCCTTTTGATGAGGTTTTTAATGCAACA |
| | monomer | CGCTTTGCCAGCGTCTATGCATGGAACCGGAAAAGAATAAGTAAT |
| | (Nucl.) | TGCGTAGCAGATTACTCTGTCCTCTATAATTCTGCATCATTCTCT |
| | | GCATTCAAATGTTATGGGGTTAGTCCCACAAAGTTGAACGATCTT |
| | | TGCTTCACCAACGTATATGCAGACAGCTTCGTCATTAGGGGGAAC |
| | | GAAGTATCACAGATCGCTCCCGGACAAACTGGGAACATAGCCGAC |
| | | TACAATTATAAGTTGCCTGATGACTTTACAGGTTGCGTCATTGCT |
| | | TGGAACTCAAATAAACTCGATTCCAAGGTCGGCGGCAATTATAAC |
| | | TATCTTTATAGGCTTTTCCGTAAGTCTAATCTGAAGCCTTTTGAG |
| | | AGAGATATATCTACTGAAATCTACCAGGCAGGTAATAAGCCTTGT |
| | | AACGGCGTAGCTGGTTTCAACTGTTATTTCCCCCTTCAATCATAT |
| | | GGTTTCCAACCAACCTACGGAGTCGGGTATCAGCCTTACCGCGTA |
| | | GTAGTTCTTAGTTTCGAGTTGCTTCATGCTCCAGCCACCGTGTGT |
| | | GGTCCTAAGAAATCAACAAATCTCGTCAAAAATAAA |
| 2073 | BA.X-7- | AACATCACAAACCTTTGTCCTTTTGATGAGGTATTTAATGCCACC |
| | monomer | AGGTTCGCATCTGTCTACGCATGGAATAGAAAACGGATCTCTAAT |
| | (Nucl.) | TGCGTTGCCGATTATAGCGTGCTTTACAACTTCGCTCCCTTCTTT |
| | | GCTTTTAAGTGCTATGGAGTCAGCCCAACAAAGCTCAATGATCTC |
| | | TGTTTCACAAATGTTTACGCAGATAGCTTTGTCATCCGCGGCAAC |
| | | GAGGTTTCCCAAATAGCACCAGGTCAGACTGGTAACATCGCAGAC |
| | | TATAACTATAAACTCCCAGACGATTTTACTGGGTGTGTTATTGCT |
| | | TGGAATAGCAATAAGTTGGACTCTAAGGTCGGTGGAAACTATAAT |
| | | TATTTGTATAGATTGTTCAGAAAAAGTAACCTCAAACCATTCGAG |
| | | AGAGACATTTCAACTGAGATATACCAAGCAGGTAACAAACCTTGC |
| | | AATGGGGTAGCAGGTTTTAATTGCTATTTCCCACTGCGAAGCTAT |
| | | GGTTTCCGTCCAACCTATGGTGTCGGCCATCAGCCTTACCGCGTA |
| | | GTGGTCCTCTCCTTTGAACTTCTTCACGCTCCTGCAACAGTTTGT |
| | | GGCCCCAAAAAGTCAACAAACCTCGTCAAAAATAAG |
| 2074 | BA.X-8- | AATATTACAAATCTCTGCCCATTTGACGAAGTCTTCAATGCAACC |
| | monomer | CGCTTCGCTTCAGTCTACGCCTGGAACCGCAAGCGCATCAGCAAC |
| | (Nucl.) | TGTGTAGCCGATTATAGTGTTCTCTATAATTTGGCCTCTTTCTCC |
| | | ACCTTCAAATGTTATGGTGTCAGCCCTACTAAACTTAACGACCTC |
| | | TGCTTTACCAACGTATATGCCGATTCATTCGTGATCCGTGGCGAT |
| | | GAGGTGCGCCAGATTGCCCCAGGGCAAACCGGCAACATAGCCGAC |
| | | TATAACTATAAGCTCCCCGATGACTTCACTGGTTGCGTAATCGCT |
| | | TGGAATTCCAATAAACTCGACTCCAAAGTCAGTGGTAACTATAAT |
| | | TACCTCTATCGCCTCTTTCGGAAATCAAATCTCAAGCCTTTCGAA |
| | | CGCGATATTTCCACAGAAATATACCAGGCAGGTAATAAGCCATGT |
| | | AACGGGGTCGCCGGGTTCAATTGCTATTTTCCTCTTAGGTCATAC |
| | | TCCTTTCGGCCCACTTATGGCGTGGGACACCAGCCTTACCGCGTT |
| | | GTAGTGCTTTCCTTTGAATTGCTGCATGCCCCAGCTACTGTCTGT |
| | | GGGCCTAAGAAGAGTACCAATCTTGTGAAGAATAAG |
| 2075 | BA.X-9- | AACATTACCAATCTGTGTCCTTTTGACGAAGTCTTCAATGCTACA |
| | monomer | AAATTTGCTAGCGTCTACGCATGGAACCGTAAACGAATAAGTAAC |
| | (Nucl.) | TGCGTGGCCGACTACTCTGTCTTGTATAACTCTGCCAGCTTCTCA |
| | | GCCTTCAAGTGCTATGGTGTTAGCCCAACCAAACTGAATGACCTG |
| | | TGTTTTACCAACGTCTACGCCGATTCCTTCGTCATCCGTGGTAAC |
| | | GAGGTCTCTCAAATAGCACCCGGACAAACAGGGAATATCGCAGAT |
| | | TACAATTATAAACTTCCTGATGACTTTACTGGCTGCGTGATCGCT |
| | | TGGAATAGCAATAAACTGGATTCTAAGGTGTCCGGCAACTATAAT |
| | | TACCGATATCGCCTCTTTCGCAAGTCTAATCTCAAACCCTTTGAA |
| | | CGCGACATCAGCACAGAAATCTATCAAGCTGGCAATAAGCCCTGC |
| | | AACGGGGTTAAGGGATTCAACTGTTATTTTCCCCTCAGGTCATAT |
| | | TCCTTTAGACCTACTTACGGTGTAGGCCATCAGCCCTATCGTGTG |
| | | GTAGTGCTTAGTTTCGAACTGCTTCACGCTCCCGCTACAGTTTGC |
| | | GGACCAAAAAAGTCTACCAATCTGGTTAAGAATAAA |
| 2076 | BA.X-10- | AACATCACAAACTTGTGCCCTTTTGATGAAGTGTTCAACGCTACT |
| | monomer | CGCTTTGCCTCAGTCTACGCTTGGAACAGAAAGCGGATAAGCAAT |
| | (Nucl.) | TGTGTCGCAGACTACTCCGTTCTCTATAACTCTGCCCCCTTTAGC |
| | | GCATTCAAATGTTACGGAGTGTCTCCTACTAAACTTAACGATCTC |
| | | TGCTTTACAAACGTATATGCTGATTCCTTCGTGATTAGGGGGAAC |
| | | GAGGTCTCCCAAATTGCACCCGGCCAGACCGGGAACATCGCAGAC |
| | | TATAACTACAAGCTGCCTGATGATTTTACTGGATGCGTTATCGCC |
| | | TGGAATAGCAACAAACTCGACAGTAAAGTTGGCGGGAACTACAAC |
| | | TACAGATACCGTCTTTTTCGGAAAAGCAATCTCAAACCTTTTGAA |
| | | AGAGACATATCAACAGAAATATATCAGGCAGGCAATAAACCTTGT |
| | | AATGGAGTAGCTGGATTCAACTGTTACTTTCCACTTCGGAGTTAC |
| | | GGGTTTCGTCCAACATATGGTGTCGGGCACCAACCTTATCGTGTA |
| | | GTAGTGCTCAGTTTTGAACTTCTTCACGCTCCAGCTACCGTGTGT |
| | | GGTCCTAAGAAATCCACCAATCTGGTGAAGAACAAG |

[0163] While the invention has been illustrated and described in detail in the drawings and foregoing description, such illustration and description are to be considered illustrative or exemplary and not restrictive. It will be understood that changes and modifications may be made by those of ordinary skill within the scope of the following claims. In particular, the present invention covers further embodiments with any combination of features from different embodiments described above and below. Additionally, statements made herein characterizing the invention refer to an embodiment of the invention and not necessarily all embodiments.

[0164] The terms used in the claims should be construed to have the broadest reasonable interpretation consistent with the foregoing description. For example, the use of the article “a” or “the” in introducing an element should not be interpreted as being exclusive of a plurality of elements. Likewise, the recitation of “or” should be interpreted as being inclusive, such that the recitation of “A or B” is not exclusive of “A and B,” unless it is clear from the context or the foregoing description that only one of A and B is intended. Further, the recitation of “at least one of A, B and C” should be interpreted as one or more of a group of elements consisting of A, B and C, and should not be interpreted as requiring at least one of each of the listed elements A, B and C, regardless of whether A, B and C are related as categories or otherwise. Moreover, the recitation of “A, B and/or C” or “at least one of A, B or C” should be interpreted as including any singular entity from the listed elements, e.g., A, any subset from the listed elements, e.g., A and B, or the entire list of elements A, B and C.

The application's sequence listing, which the Patent Office published only in electronic form, follows.

SEQUENCE LISTING (2076 sequences)

SEQ ID NO: 1 - protein, 337 aa, synthetic construct
  REGION 1..337: note = CTD_long_a
TLKSFTVEKGIYQTSNFRVQPTESIVRFPNITNLCPFGEVFNATRFASVYAWNRKRISNCVADYSVLYNSASFSTFKCYGVSPTKLNDLCFTNVYADSFVIRGDEVRQIAPGQTGKIADYNYKLPDDFTGCVIAWNSNNLDSKVGGNYNYLYRLFRKSNLKPFERDISTEIYQAGSTPCNGVEGFNCYFPLQSYGFQPTNGVGYQPYRVVVLSFELLHAPATVCGPKKSTNLVKNKCVNFNFNGLTGTGVLTESNKKFLPFQQFGRDIADTTDAVRDPQTLEILDITPCSFGGVSVITPGTNTSNQVAVLYQDVNCTEVPVAIHADQLTPTWRVYST

SEQ ID NO: 2 - DNA, 1011 bp, synthetic construct
  misc_feature 1..1011: note = CTD_long_a
  source 1..1011: mol_type = other DNA
accctcaagtctttcactgtggagaaagggatctatcaaaccagcaattttagggttcagcccaccgaatcaatagtacggttcccaaatatcactaatctttgccccttcggggaagtatttaacgctactcgatttgctagcgtatatgcctggaaccggaagagaataagcaactgtgttgcagactatagcgtgctttacaattccgcatcctttagtaccttcaaatgttacggtgtgagccccaccaaactcaatgatctctgtttcacaaacgtgtacgcagatagtttcgttatacgcggggacgaagtacggcagatagcccctggccagacaggaaagatagccgattacaactacaaacttccagacgattttacagggtgtgtgatcgcttggaattcaaataacctggactccaaagtgggaggcaactataattacctgtaccgactgttccgcaaaagcaacttgaaacctttcgagcgagatatatcaaccgaaatctaccaagctggttctacaccttgtaatggtgtggagggatttaactgctacttccctcttcagtcctatggatttcagcctacaaatggagtcgggtatcaaccctatagagtcgtggtgttgtcatttgaacttctccatgcacctgctactgtctgtggtccaaaaaagtccactaatcttgtaaaaaacaaatgcgtgaacttcaatttcaatggcctcaccggaacaggtgttttgacagaatctaacaaaaaattccttcccttccagcaattcgggagagatatcgctgacacaaccgacgccgtaagagatccccagactcttgagatccttgacatcaccccatgcagttttggaggcgtgtctgtgatcacccctggcacaaacacctcaaaccaggtggctgtgctgtatcaagatgtcaattgcaccgaggtgcctgtggcaatacatgctgaccagctcaccccaacctggcgagtgtactctacc

SEQ ID NO: 3 - protein, 337 aa, synthetic construct
  REGION 1..337: note = CTD_long_a_D614G
TLKSFTVEKGIYQTSNFRVQPTESIVRFPNITNLCPFGEVFNATRFASVYAWNRKRISNCVADYSVLYNSASFSTFKCYGVSPTKLNDLCFTNVYADSFVIRGDEVRQIAPGQTGKIADYNYKLPDDFTGCVIAWNSNNLDSKVGGNYNYLYRLFRKSNLKPFERDISTEIYQAGSTPCNGVEGFNCYFPLQSYGFQPTNGVGYQPYRVVVLSFELLHAPATVCGPKKSTNLVKNKCVNFNFNGLTGTGVLTESNKKFLPFQQFGRDIADTTDAVRDPQTLEILDITPCSFGGVSVITPGTNTSNQVAVLYQGVNCTEVPVAIHADQLTPTWRVYST

SEQ ID NO: 4 - DNA, 1011 bp, synthetic construct
  misc_feature 1..1011: note = CTD_long_a_D614G
  source 1..1011: mol_type = other DNA
accctcaagtctttcactgtggagaaagggatctatcaaaccagcaattttagggttcagcccaccgaatcaatagtacggttcccaaatatcactaatctttgccccttcggggaagtatttaacgctactcgatttgctagcgtatatgcctggaaccggaagagaataagcaactgtgttgcagactatagcgtgctttacaattccgcatcctttagtaccttcaaatgttacggtgtgagccccaccaaactcaatgatctctgtttcacaaacgtgtacgcagatagtttcgttatacgcggggacgaagtacggcagatagcccctggccagacaggaaagatagccgattacaactacaaacttccagacgattttacagggtgtgtgatcgcttggaattcaaataacctggactccaaagtgggaggcaactataattacctgtaccgactgttccgcaaaagcaacttgaaacctttcgagcgagatatatcaaccgaaatctaccaagctggttctacaccttgtaatggtgtggagggatttaactgctacttccctcttcagtcctatggatttcagcctacaaatggagtcgggtatcaaccctatagagtcgtggtgttgtcatttgaacttctccatgcacctgctactgtctgtggtccaaaaaagtccactaatcttgtaaaaaacaaatgcgtgaacttcaatttcaatggcctcaccggaacaggtgttttgacagaatctaacaaaaaattccttcccttccagcaattcgggagagatatcgctgacacaaccgacgccgtaagagatccccagactcttgagatccttgacatcaccccatgcagttttggaggcgtgtctgtgatcacccctggcacaaacacctcaaaccaggtggctgtgctgtatcaaggtgtcaattgcaccgaggtgcctgtggcaatacatgctgaccagctcaccccaacctggcgagtgtactctacc

SEQ ID NO: 5 - protein, 684 aa, synthetic construct
  REGION 1..684: note = CTD_long_a-dimer
TLKSFTVEKGIYQTSNFRVQPTESIVRFPNITNLCPFGEVFNATRFASVYAWNRKRISNCVADYSVLYNSASFSTFKCYGVSPTKLNDLCFTNVYADSFVIRGDEVRQIAPGQTGKIADYNYKLPDDFTGCVIAWNSNNLDSKVGGNYNYLYRLFRKSNLKPFERDISTEIYQAGSTPCNGVEGFNCYFPLQSYGFQPTNGVGYQPYRVVVLSFELLHAPATVCGPKKSTNLVKNKCVNFNFNGLTGTGVLTESNKKFLPFQQFGRDIADTTDAVRDPQTLEILDITPCSFGGVSVITPGTNTSNQVAVLYQDVNCTEVPVAIHADQLTPTWRVYSTGGGGSGGGGSTLKSFTVEKGIYQTSNFRVQPTESIVRFPNITNLCPFGEVFNATRFASVYAWNRKRISNCVADYSVLYNSASFSTFKCYGVSPTKLNDLCFTNVYADSFVIRGDEVRQIAPGQTGKIADYNYKLPDDFTGCVIAWNSNNLDSKVGGNYNYLYRLFRKSNLKPFERDISTEIYQAGSTPCNGVEGFNCYFPLQSYGFQPTNGVGYQPYRVVVLSFELLHAPATVCGPKKSTNLVKNKCVNFNFNGLTGTGVLTESNKKFLPFQQFGRDIADTTDAVRDPQTLEILDITPCSFGGVSVITPGTNTSNQVAVLYQDVNCTEVPVAIHADQLTPTWRVYST

SEQ ID NO: 6 - DNA, 2052 bp, synthetic construct
  misc_feature 1..2052: note = CTD_long_a-dimer
  source 1..2052: mol_type = other DNA
accctcaagtctttcactgtggagaaagggatctatcaaaccagcaattttagggttcagcccaccgaatcaatagtacggttcccaaatatcactaatctttgccccttcggggaagtatttaacgctactcgatttgctagcgtatatgcctggaaccggaagagaataagcaactgtgttgcagactatagcgtgctttacaattccgcatcctttagtaccttcaaatgttacggtgtgagccccaccaaactcaatgatctctgtttcacaaacgtgtacgcagatagtttcgttatacgcggggacgaagtacggcagatagcccctggccagacaggaaagatagccgattacaactacaaacttccagacgattttacagggtgtgtgatcgcttggaattcaaataacctggactccaaagtgggaggcaactataattacctgtaccgactgttccgcaaaagcaacttgaaacctttcgagcgagatatatcaaccgaaatctaccaagctggttctacaccttgtaatggtgtggagggatttaactgctacttccctcttcagtcctatggatttcagcctacaaatggagtcgggtatcaaccctatagagtcgtggtgttgtcatttgaacttctccatgcacctgctactgtctgtggtccaaaaaagtccactaatcttgtaaaaaacaaatgcgtgaacttcaatttcaatggcctcaccggaacaggtgttttgacagaatctaacaaaaaattccttcccttccagcaattcgggagagatatcgctgacacaaccgacgccgtaagagatccccagactcttgagatccttgacatcaccccatgcagttttggaggcgtgtctgtgatcacccctggcacaaacacctcaaaccaggtggctgtgctgtatcaagatgtcaattgcaccgaggtgcctgtggcaatacatgctgaccagctcaccccaacctggcgagtgtactctaccggtggcggtggctccgggggcggaggttccaccctcaagtctttcactgtggagaaagggatctatcaaaccagcaattttagggttcagcccaccgaatcaatagtacggttcccaaatatcactaatctttgccccttcggggaagtatttaacgctactcgatttgctagcgtatatgcctggaaccggaagagaataagcaactgtgttgcagactatagcgtgctttacaattccgcatcctttagtaccttcaaatgttacggtgtgagccccaccaaactcaatgatctctgtttcacaaacgtgtacgcagatagtttcgttatacgcggggacgaagtacggcagatagcccctggccagacaggaaagatagccgattacaactacaaacttccagacgattttacagggtgtgtgatcgcttggaattcaaataacctggactccaaagtgggaggcaactataattacctgtaccgactgttccgcaaaagcaacttgaaacctttcgagcgagatatatcaaccgaaatctaccaagctggttctacaccttgtaatggtgtggagggatttaactgctacttccctcttcagtcctatggatttcagcctacaaatggagtcgggtatcaaccctatagagtcgtggtgttgtcatttgaacttctccatgcacctgctactgtctgtggtccaaaaaagtccactaatcttgtaaaaaacaaatgcgtgaacttcaatttcaatggcctcaccggaacaggtgttttgacagaatctaacaaaaaattccttcccttccagcaattcgggagagatatcgctgacacaaccgacgccgtaagagatccccagactcttgagatccttgacatcaccccatgcagttttggaggcgtgtctgtgatcacccctggcacaaacacctcaaaccaggtggctgtgctgtatcaagatgtcaattgcaccgaggtgcctgtggcaatacatgctgaccagctcaccccaacctggcgagtgtactctacc

SEQ ID NO: 7 - protein, 329 aa, synthetic construct
  REGION 1..329: note = CTD_long_b
KGIYQTSNFRVQPTESIVRFPNITNLCPFGEVFNATRFASVYAWNRKRISNCVADYSVLYNSASFSTFKCYGVSPTKLNDLCFTNVYADSFVIRGDEVRQIAPGQTGKIADYNYKLPDDFTGCVIAWNSNNLDSKVGGNYNYLYRLFRKSNLKPFERDISTEIYQAGSTPCNGVEGFNCYFPLQSYGFQPTNGVGYQPYRVVVLSFELLHAPATVCGPKKSTNLVKNKCVNFNFNGLTGTGVLTESNKKFLPFQQFGRDIADTTDAVRDPQTLEILDITPCSFGGVSVITPGTNTSNQVAVLYQDVNCTEVPVAIHADQLTPTWRVYST

SEQ ID NO: 8 - DNA, 987 bp, synthetic construct
  misc_feature 1..987: note = CTD_long_b
  source 1..987: mol_type = other DNA
aaagggatctatcaaaccagcaattttagggttcagcccaccgaatcaatagtacggttcccaaatatcactaatctttgccccttcggggaagtatttaacgctactcgatttgctagcgtatatgcctggaaccggaagagaataagcaactgtgttgcagactatagcgtgctttacaattccgcatcctttagtaccttcaaatgttacggtgtgagccccaccaaactcaatgatctctgtttcacaaacgtgtacgcagatagtttcgttatacgcggggacgaagtacggcagatagcccctggccagacaggaaagatagccgattacaactacaaacttccagacgattttacagggtgtgtgatcgcttggaattcaaataacctggactccaaagtgggaggcaactataattacctgtaccgactgttccgcaaaagcaacttgaaacctttcgagcgagatatatcaaccgaaatctaccaagctggttctacaccttgtaatggtgtggagggatttaactgctacttccctcttcagtcctatggatttcagcctacaaatggagtcgggtatcaaccctatagagtcgtggtgttgtcatttgaacttctccatgcacctgctactgtctgtggtccaaaaaagtccactaatcttgtaaaaaacaaatgcgtgaacttcaatttcaatggcctcaccggaacaggtgttttgacagaatctaacaaaaaattccttcccttccagcaattcgggagagatatcgctgacacaaccgacgccgtaagagatccccagactcttgagatccttgacatcaccccatgcagttttggaggcgtgtctgtgatcacccctggcacaaacacctcaaaccaggtggctgtgctgtatcaagatgtcaattgcaccgaggtgcctgtggcaatacatgctgaccagctcaccccaacctggcgagtgtactctacc

SEQ ID NO: 9 - protein, 325 aa, synthetic construct
  REGION 1..325: note = CTD_long_c
KGIYQTSNFRVQPTESIVRFPNITNLCPFGEVFNATRFASVYAWNRKRISNCVADYSVLYNSASFSTFKCYGVSPTKLNDLCFTNVYADSFVIRGDEVRQIAPGQTGKIADYNYKLPDDFTGCVIAWNSNNLDSKVGGNYNYLYRLFRKSNLKPFERDISTEIYQAGSTPCNGVEGFNCYFPLQSYGFQPTNGVGYQPYRVVVLSFELLHAPATVCGPKKSTNLVKNKCVNFNFNGLTGTGVLTESNKKFLPFQQFGRDIADTTDAVRDPQTLEILDITPCSFGGVSVITPGTNTSNQVAVLYQDVNCTEVPVAIHADQLTPTWR

SEQ ID NO: 10 - DNA, 975 bp, synthetic construct
  misc_feature 1..975: note = CTD_long_c
  source 1..975: mol_type = other DNA
aaagggatctatcaaaccagcaattttagggttcagcccaccgaatcaatagtacggttcccaaatatcactaatctttgccccttcggggaagtatttaacgctactcgatttgctagcgtatatgcctggaaccggaagagaataagcaactgtgttgcagactatagcgtgctttacaattccgcatcctttagtaccttcaaatgttacggtgtgagccccaccaaactcaatgatctctgtttcacaaacgtgtacgcagatagtttcgttatacgcggggacgaagtacggcagatagcccctggccagacaggaaagatagccgattacaactacaaacttccagacgattttacagggtgtgtgatcgcttggaattcaaataacctggactccaaagtgggaggcaactataattacctgtaccgactgttccgcaaaagcaacttgaaacctttcgagcgagatatatcaaccgaaatctaccaagctggttctacaccttgtaatggtgtggagggatttaactgctacttccctcttcagtcctatggatttcagcctacaaatggagtcgggtatcaaccctatagagtcgtggtgttgtcatttgaacttctccatgcacctgctactgtctgtggtccaaaaaagtccactaatcttgtaaaaaacaaatgcgtgaacttcaatttcaatggcctcaccggaacaggtgttttgacagaatctaacaaaaaattccttcccttccagcaattcgggagagatatcgctgacacaaccgacgccgtaagagatccccagactcttgagatccttgacatcaccccatgcagttttggaggcgtgtctgtgatcacccctggcacaaacacctcaaaccaggtggctgtgctgtatcaagatgtcaattgcaccgaggtgcctgtggcaatacatgctgaccagctcaccccaacctggcga

SEQ ID NO: 11 - protein, 310 aa, synthetic construct
  REGION 1..310: note = CTD_long_d
KGIYQTSNFRVQPTESIVRFPNITNLCPFGEVFNATRFASVYAWNRKRISNCVADYSVLYNSASFSTFKCYGVSPTKLNDLCFTNVYADSFVIRGDEVRQIAPGQTGKIADYNYKLPDDFTGCVIAWNSNNLDSKVGGNYNYLYRLFRKSNLKPFERDISTEIYQAGSTPCNGVEGFNCYFPLQSYGFQPTNGVGYQPYRVVVLSFELLHAPATVCGPKKSTNLVKNKCVNFNFNGLTGTGVLTESNKKFLPFQQFGRDIADTTDAVRDPQTLEILDITPCSFGGVSVITPGTNTSNQVAVLYQDVNCTE

SEQ ID NO: 12 - DNA, 930 bp, synthetic construct
  misc_feature 1..930: note = CTD_long_d
  source 1..930: mol_type = other DNA
aaagggatctatcaaaccagcaattttagggttcagcccaccgaatcaatagtacggttcccaaatatcactaatctttgccccttcggggaagtatttaacgctactcgatttgctagcgtatatgcctggaaccggaagagaataagcaactgtgttgcagactatagcgtgctttacaattccgcatcctttagtaccttcaaatgttacggtgtgagccccaccaaactcaatgatctctgtttcacaaacgtgtacgcagatagtttcgttatacgcggggacgaagtacggcagatagcccctggccagacaggaaagatagccgattacaactacaaacttccagacgattttacagggtgtgtgatcgcttggaattcaaataacctggactccaaagtgggaggcaactataattacctgtaccgactgttccgcaaaagcaacttgaaacctttcgagcgagatatatcaaccgaaatctaccaagctggttctacaccttgtaatggtgtggagggatttaactgctacttccctcttcagtcctatggatttcagcctacaaatggagtcgggtatcaaccctatagagtcgtggtgttgtcatttgaacttctccatgcacctgctactgtctgtggtccaaaaaagtccactaatcttgtaaaaaacaaatgcgtgaacttcaatttcaatggcctcaccggaacaggtgttttgacagaatctaacaaaaaattccttcccttccagcaattcgggagagatatcgctgacacaaccgacgccgtaagagatccccagactcttgagatccttgacatcaccccatgcagttttggaggcgtgtctgtgatcacccctggcacaaacacctcaaaccaggtggctgtgctgtatcaagatgtcaattgcaccgag

SEQ ID NO: 13 - protein, 298 aa, synthetic construct
  REGION 1..298: note = CTD_long_e
KGIYQTSNFRVQPTESIVRFPNITNLCPFGEVFNATRFASVYAWNRKRISNCVADYSVLYNSASFSTFKCYGVSPTKLNDLCFTNVYADSFVIRGDEVRQIAPGQTGKIADYNYKLPDDFTGCVIAWNSNNLDSKVGGNYNYLYRLFRKSNLKPFERDISTEIYQAGSTPCNGVEGFNCYFPLQSYGFQPTNGVGYQPYRVVVLSFELLHAPATVCGPKKSTNLVKNKCVNFNFNGLTGTGVLTESNKKFLPFQQFGRDIADTTDAVRDPQTLEILDITPCSFGGVSVITPGTNTSNQ

SEQ ID NO: 14 - DNA, 894 bp, synthetic construct
  misc_feature 1..894: note = CTD_long_e
  source 1..894: mol_type = other DNA
aaagggatctatcaaaccagcaattttagggttcagcccaccgaatcaatagtacggttcccaaatatcactaatctttgccccttcggggaagtatttaacgctactcgatttgctagcgtatatgcctggaaccggaagagaataagcaactgtgttgcagactatagcgtgctttacaattccgcatcctttagtaccttcaaatgttacggtgtgagccccaccaaactcaatgatctctgtttcacaaacgtgtacgcagatagtttcgttatacgcggggacgaagtacggcagatagcccctggccagacaggaaagatagccgattacaactacaaacttccagacgattttacagggtgtgtgatcgcttggaattcaaataacctggactccaaagtgggaggcaactataattacctgtaccgactgttccgcaaaagcaacttgaaacctttcgagcgagatatatcaaccgaaatctaccaagctggttctacaccttgtaatggtgtggagggatttaactgctacttccctcttcagtcctatggatttcagcctacaaatggagtcgggtatcaaccctatagagtcgtggtgttgtcatttgaacttctccatgcacctgctactgtctgtggtccaaaaaagtccactaatcttgtaaaaaacaaatgcgtgaacttcaatttcaatggcctcaccggaacaggtgttttgacagaatctaacaaaaaattccttcccttccagcaattcgggagagatatcgctgacacaaccgacgccgtaagagatccccagactcttgagatccttgacatcaccccatgcagttttggaggcgtgtctgtgatcacccctggcacaaacacctcaaaccag

SEQ ID NO: 15 - protein, 293 aa, synthetic construct
  REGION 1..293: note = CTD_long_f
KGIYQTSNFRVQPTESIVRFPNITNLCPFGEVFNATRFASVYAWNRKRISNCVADYSVLYNSASFSTFKCYGVSPTKLNDLCFTNVYADSFVIRGDEVRQIAPGQTGKIADYNYKLPDDFTGCVIAWNSNNLDSKVGGNYNYLYRLFRKSNLKPFERDISTEIYQAGSTPCNGVEGFNCYFPLQSYGFQPTNGVGYQPYRVVVLSFELLHAPATVCGPKKSTNLVKNKCVNFNFNGLTGTGVLTESNKKFLPFQQFGRDIADTTDAVRDPQTLEILDITPCSFGGVSVITPGT

SEQ ID NO: 16 - DNA, 879 bp, synthetic construct
  misc_feature 1..879: note = CTD_long_f
  source 1..879: mol_type = other DNA
aaagggatctatcaaaccagcaattttagggttcagcccaccgaatcaatagtacggttcccaaatatcactaatctttgccccttcggggaagtatttaacgctactcgatttgctagcgtatatgcctggaaccggaagagaataagcaactgtgttgcagactatagcgtgctttacaattccgcatcctttagtaccttcaaatgttacggtgtgagccccaccaaactcaatgatctctgtttcacaaacgtgtacgcagatagtttcgttatacgcggggacgaagtacggcagatagcccctggccagacaggaaagatagccgattacaactacaaacttccagacgattttacagggtgtgtgatcgcttggaattcaaataacctggactccaaagtgggaggcaactataattacctgtaccgactgttccgcaaaagcaacttgaaacctttcgagcgagatatatcaaccgaaatctaccaagctggttctacaccttgtaatggtgtggagggatttaactgctacttccctcttcagtcctatggatttcagcctacaaatggagtcgggtatcaaccctatagagtcgtggtgttgtcatttgaacttctccatgcacctgctactgtctgtggtccaaaaaagtccactaatcttgtaaaaaacaaatgcgtgaacttcaatttcaatggcctcaccggaacaggtgttttgacagaatctaacaaaaaattccttcccttccagcaattcgggagagatatcgctgacacaaccgacgccgtaagagatccccagactcttgagatccttgacatcaccccatgcagttttggaggcgtgtctgtgatcacccctggcaca

SEQ ID NO: 17 - protein, 315 aa, synthetic construct
  REGION 1..315: note = CTD_long_g
SFTVEKGIYQTSNFRVQPTESIVRFPNITNLCPFGEVFNATRFASVYAWNRKRISNCVADYSVLYNSASFSTFKCYGVSPTKLNDLCFTNVYADSFVIRGDEVRQIAPGQTGKIADYNYKLPDDFTGCVIAWNSNNLDSKVGGNYNYLYRLFRKSNLKPFERDISTEIYQAGSTPCNGVEGFNCYFPLQSYGFQPTNGVGYQPYRVVVLSFELLHAPATVCGPKKSTNLVKNKCVNFNFNGLTGTGVLTESNKKFLPFQQFGRDIADTTDAVRDPQTLEILDITPCSFGGVSVITPGTNTSNQVAVLYQDVNCTE

SEQ ID NO: 18 - DNA, 945 bp, synthetic construct
  misc_feature 1..945: note = CTD_long_g
  source 1..945: mol_type = other DNA
tctttcactgtggagaaagggatctatcaaaccagcaattttagggttcagcccaccgaatcaatagtacggttcccaaatatcactaatctttgccccttcggggaagtatttaacgctactcgatttgctagcgtatatgcctggaaccggaagagaataagcaactgtgttgcagactatagcgtgctttacaattccgcatcctttagtaccttcaaatgttacggtgtgagccccaccaaactcaatgatctctgtttcacaaacgtgtacgcagatagtttcgttatacgcggggacgaagtacggcagatagcccctggccagacaggaaagatagccgattacaactacaaacttccagacgattttacagggtgtgtgatcgcttggaattcaaataacctggactccaaagtgggaggcaactataattacctgtaccgactgttccgcaaaagcaacttgaaacctttcgagcgagatatatcaaccgaaatctaccaagctggttctacaccttgtaatggtgtggagggatttaactgctacttccctcttcagtcctatggatttcagcctacaaatggagtcgggtatcaaccctatagagtcgtggtgttgtcatttgaacttctccatgcacctgctactgtctgtggtccaaaaaagtccactaatcttgtaaaaaacaaatgcgtgaacttcaatttcaatggcctcaccggaacaggtgttttgacagaatctaacaaaaaattccttcccttccagcaattcgggagagatatcgctgacacaaccgacgccgtaagagatccccagactcttgagatccttgacatcaccccatgcagttttggaggcgtgtctgtgatcacccctggcacaaacacctcaaaccaggtggctgtgctgtatcaagatgtcaattgcaccgag

SEQ ID NO: 19 - protein, 303 aa, synthetic construct
  REGION 1..303: note = CTD_long_h
SFTVEKGIYQTSNFRVQPTESIVRFPNITNLCPFGEVFNATRFASVYAWNRKRISNCVADYSVLYNSASFSTFKCYGVSPTKLNDLCFTNVYADSFVIRGDEVRQIAPGQTGKIADYNYKLPDDFTGCVIAWNSNNLDSKVGGNYNYLYRLFRKSNLKPFERDISTEIYQAGSTPCNGVEGFNCYFPLQSYGFQPTNGVGYQPYRVVVLSFELLHAPATVCGPKKSTNLVKNKCVNFNFNGLTGTGVLTESNKKFLPFQQFGRDIADTTDAVRDPQTLEILDITPCSFGGVSVITPGTNTSNQ

SEQ ID NO: 20 - DNA, 909 bp, synthetic construct
  misc_feature 1..909: note = CTD_long_h
  source 1..909: mol_type = other DNA
tctttcactgtggagaaagggatctatcaaaccagcaattttagggttcagcccaccgaatcaatagtacggttcccaaatatcactaatctttgccccttcggggaagtatttaacgctactcgatttgctagcgtatatgcctggaaccggaagagaataagcaactgtgttgcagactatagcgtgctttacaattccgcatcctttagtaccttcaaatgttacggtgtgagccccaccaaactcaatgatctctgtttcacaaacgtgtacgcagatagtttcgttatacgcggggacgaagtacggcagatagcccctggccagacaggaaagatagccgattacaactacaaacttccagacgattttacagggtgtgtgatcgcttggaattcaaataacctggactccaaagtgggaggcaactataattacctgtaccgactgttccgcaaaagcaacttgaaacctttcgagcgagatatatcaaccgaaatctaccaagctggttctacaccttgtaatggtgtggagggatttaactgctacttccctcttcagtcctatggatttcagcctacaaatggagtcgggtatcaaccctatagagtcgtggtgttgtcatttgaacttctccatgcacctgctactgtctgtggtccaaaaaagtccactaatcttgtaaaaaacaaatgcgtgaacttcaatttcaatggcctcaccggaacaggtgttttgacagaatctaacaaaaaattccttcccttccagcaattcgggagagatatcgctgacacaaccgacgccgtaagagatccccagactcttgagatccttgacatcaccccatgcagttttggaggcgtgtctgtgatcacccctggcacaaacacctcaaaccag

SEQ ID NO: 21 - protein, 298 aa, synthetic construct
  REGION 1..298: note = CTD_long_i
SFTVEKGIYQTSNFRVQPTESIVRFPNITNLCPFGEVFNATRFASVYAWNRKRISNCVADYSVLYNSASFSTFKCYGVSPTKLNDLCFTNVYADSFVIRGDEVRQIAPGQTGKIADYNYKLPDDFTGCVIAWNSNNLDSKVGGNYNYLYRLFRKSNLKPFERDISTEIYQAGSTPCNGVEGFNCYFPLQSYGFQPTNGVGYQPYRVVVLSFELLHAPATVCGPKKSTNLVKNKCVNFNFNGLTGTGVLTESNKKFLPFQQFGRDIADTTDAVRDPQTLEILDITPCSFGGVSVITPGT

SEQ ID NO: 22 - DNA, 894 bp, synthetic construct
  misc_feature 1..894: note = CTD_long_i
  source 1..894: mol_type = other DNA
tctttcactgtggagaaagggatctatcaaaccagcaattttagggttcagcccaccgaatcaatagtacggttcccaaatatcactaatctttgccccttcggggaagtatttaacgctactcgatttgctagcgtatatgcctggaaccggaagagaataagcaactgtgttgcagactatagcgtgctttacaattccgcatcctttagtaccttcaaatgttacggtgtgagccccaccaaactcaatgatctctgtttcacaaacgtgtacgcagatagtttcgttatacgcggggacgaagtacggcagatagcccctggccagacaggaaagatagccgattacaactacaaacttccagacgattttacagggtgtgtgatcgcttggaattcaaataacctggactccaaagtgggaggcaactataattacctgtaccgactgttccgcaaaagcaacttgaaacctttcgagcgagatatatcaaccgaaatctaccaagctggttctacaccttgtaatggtgtggagggatttaactgctacttccctcttcagtcctatggatttcagcctacaaatggagtcgggtatcaaccctatagagtcgtggtgttgtcatttgaacttctccatgcacctgctactgtctgtggtccaaaaaagtccactaatcttgtaaaaaacaaatgcgtgaacttcaatttcaatggcctcaccggaacaggtgttttgacagaatctaacaaaaaattccttcccttccagcaattcgggagagatatcgctgacacaaccgacgccgtaagagatccccagactcttgagatccttgacatcaccccatgcagttttggaggcgtgtctgtgatcacccctggcaca

SEQ ID NO: 23 - protein, 273 aa, synthetic construct
  REGION 1..273: note = CTD_short_a
RVQPTESIVRFPNITNLCPFGEVFNATRFASVYAWNRKRISNCVADYSVLYNSASFSTFKCYGVSPTKLNDLCFTNVYADSFVIRGDEVRQIAPGQTGKIADYNYKLPDDFTGCVIAWNSNNLDSKVGGNYNYLYRLFRKSNLKPFERDISTEIYQAGSTPCNGVEGFNCYFPLQSYGFQPTNGVGYQPYRVVVLSFELLHAPATVCGPKKSTNLVKNKCVNFNFNGLTGTGVLTESNKKFLPFQQFGRDIADTTDAVRDPQTLEILDITPCS

SEQ ID NO: 24 - DNA, 819 bp, synthetic construct
  misc_feature 1..819: note = CTD_short_a
  source 1..819: mol_type = other DNA
agggttcagcccaccgaatcaatagtacggttcccaaatatcactaatctttgccccttcggggaagtatttaacgctactcgatttgctagcgtatatgcctggaaccggaagagaataagcaactgtgttgcagactatagcgtgctttacaattccgcatcctttagtaccttcaaatgttacggtgtgagccccaccaaactcaatgatctctgtttcacaaacgtgtacgcagatagtttcgttatacgcggggacgaagtacggcagatagcccctggccagacaggaaagatagccgattacaactacaaacttccagacgattttacagggtgtgtgatcgcttggaattcaaataacctggactccaaagtgggaggcaactataattacctgtaccgactgttccgcaaaagcaacttgaaacctttcgagcgagatatatcaaccgaaatctaccaagctggttctacaccttgtaatggtgtggagggatttaactgctacttccctcttcagtcctatggatttcagcctacaaatggagtcgggtatcaaccctatagagtcgtggtgttgtcatttgaacttctccatgcacctgctactgtctgtggtccaaaaaagtccactaatcttgtaaaaaacaaatgcgtgaacttcaatttcaatggcctcaccggaacaggtgttttgacagaatctaacaaaaaattccttcccttccagcaattcgggagagatatcgctgacacaaccgacgccgtaagagatccccagactcttgagatccttgacatcaccccatgcagt

SEQ ID NO: 25 - protein, 261 aa, synthetic construct
  REGION 1..261: note = CTD_short_b
NITNLCPFGEVFNATRFASVYAWNRKRISNCVADYSVLYNSASFSTFKCYGVSPTKLNDLCFTNVYADSFVIRGDEVRQIAPGQTGKIADYNYKLPDDFTGCVIAWNSNNLDSKVGGNYNYLYRLFRKSNLKPFERDISTEIYQAGSTPCNGVEGFNCYFPLQSYGFQPTNGVGYQPYRVVVLSFELLHAPATVCGPKKSTNLVKNKCVNFNFNGLTGTGVLTESNKKFLPFQQFGRDIADTTDAVRDPQTLEILDITPCS

SEQ ID NO: 26 - DNA, 783 bp, synthetic construct
  misc_feature 1..783: note = CTD_short_b
  source 1..783: mol_type = other DNA
aatatcactaatctttgccccttcggggaagtatttaacgctactcgatttgctagcgtatatgcctggaaccggaagagaataagcaactgtgttgcagactatagcgtgctttacaattccgcatcctttagtaccttcaaatgttacggtgtgagccccaccaaactcaatgatctctgtttcacaaacgtgtacgcagatagtttcgttatacgcggggacgaagtacggcagatagcccctggccagacaggaaagatagccgattacaactacaaacttccagacgattttacagggtgtgtgatcgcttggaattcaaataacctggactccaaagtgggaggcaactataattacctgtaccgactgttccgcaaaagcaacttgaaacctttcgagcgagatatatcaaccgaaatctaccaagctggttctacaccttgtaatggtgtggagggatttaactgctacttccctcttcagtcctatggatttcagcctacaaatggagtcgggtatcaaccctatagagtcgtggtgttgtcatttgaacttctccatgcacctgctactgtctgtggtccaaaaaagtccactaatcttgtaaaaaacaaatgcgtgaacttcaatttcaatggcctcaccggaacaggtgttttgacagaatctaacaaaaaattccttcccttccagcaattcgggagagatatcgctgacacaaccgacgccgtaagagatccccagactcttgagatccttgacatcaccccatgcagt

SEQ ID NO: 27 - protein, 248 aa, synthetic construct
  REGION 1..248: note = CTD_short_c
NITNLCPFGEVFNATRFASVYAWNRKRISNCVADYSVLYNSASFSTFKCYGVSPTKLNDLCFTNVYADSFVIRGDEVRQIAPGQTGKIADYNYKLPDDFTGCVIAWNSNNLDSKVGGNYNYLYRLFRKSNLKPFERDISTEIYQAGSTPCNGVEGFNCYFPLQSYGFQPTNGVGYQPYRVVVLSFELLHAPATVCGPKKSTNLVKNKCVNFNFNGLTGTGVLTESNKKFLPFQQFGRDIADTTDAVRD

SEQ ID NO: 28 - DNA, 744 bp, synthetic construct
  misc_feature 1..744: note = CTD_short_c
  source 1..744: mol_type = other DNA
aatatcactaatctttgccccttcggggaagtatttaacgctactcgatttgctagcgtatatgcctggaaccggaagagaataagcaactgtgttgcagactatagcgtgctttacaattccgcatcctttagtaccttcaaatgttacggtgtgagccccaccaaactcaatgatctctgtttcacaaacgtgtacgcagatagtttcgttatacgcggggacgaagtacggcagatagcccctggccagacaggaaagatagccgattacaactacaaacttccagacgattttacagggtgtgtgatcgcttggaattcaaataacctggactccaaagtgggaggcaactataattacctgtaccgactgttccgcaaaagcaacttgaaacctttcgagcgagatatatcaaccgaaatctaccaagctggttctacaccttgtaatggtgtggagggatttaactgctacttccctcttcagtcctatggatttcagcctacaaatggagtcgggtatcaaccctatagagtcgtggtgttgtcatttgaacttctccatgcacctgctactgtctgtggtccaaaaaagtccactaatcttgtaaaaaacaaatgcgtgaacttcaatttcaatggcctcaccggaacaggtgttttgacagaatctaacaaaaaattccttcccttccagcaattcgggagagatatcgctgacacaaccgacgccgtaagagat

SEQ ID NO: 29 - protein, 238 aa, synthetic construct
  REGION 1..238: note = CTD_short_d
NITNLCPFGEVFNATRFASVYAWNRKRISNCVADYSVLYNSASFSTFKCYGVSPTKLNDLCFTNVYADSFVIRGDEVRQIAPGQTGKIADYNYKLPDDFTGCVIAWNSNNLDSKVGGNYNYLYRLFRKSNLKPFERDISTEIYQAGSTPCNGVEGFNCYFPLQSYGFQPTNGVGYQPYRVVVLSFELLHAPATVCGPKKSTNLVKNKCVNFNFNGLTGTGVLTESNKKFLPFQQFGRD

SEQ ID NO: 30 - DNA, 714 bp, synthetic construct
  misc_feature 1..714: note = CTD_short_d
  source 1..714: mol_type = other DNA
aatatcactaatctttgccccttcggggaagtatttaacgctactcgatttgctagcgtatatgcctggaaccggaagagaataagcaactgtgttgcagactatagcgtgctttacaattccgcatcctttagtaccttcaaatgttacggtgtgagccccaccaaactcaatgatctctgtttcacaaacgtgtacgcagatagtttcgttatacgcggggacgaagtacggcagatagcccctggccagacaggaaagatagccgattacaactacaaacttccagacgattttacagggtgtgtgatcgcttggaattcaaataacctggactccaaagtgggaggcaactataattacctgtaccgactgttccgcaaaagcaacttgaaacctttcgagcgagatatatcaaccgaaatctaccaagctggttctacaccttgtaatggtgtggagggatttaactgctacttccctcttcagtcctatggatttcagcctacaaatggagtcgggtatcaaccctatagagtcgtggtgttgtcatttgaacttctccatgcacctgctactgtctgtggtccaaaaaagtccactaatcttgtaaaaaacaaatgcgtgaacttcaatttcaatggcctcaccggaacaggtgttttgacagaatctaacaaaaaattccttcccttccagcaattcgggagagat

SEQ ID NO: 31 - protein, 225 aa, synthetic construct
  REGION 1..225: note = CTD_short_e
NITNLCPFGEVFNATRFASVYAWNRKRISNCVADYSVLYNSASFSTFKCYGVSPTKLNDLCFTNVYADSFVIRGDEVRQIAPGQTGKIADYNYKLPDDFTGCVIAWNSNNLDSKVGGNYNYLYRLFRKSNLKPFERDISTEIYQAGSTPCNGVEGFNCYFPLQSYGFQPTNGVGYQPYRVVVLSFELLHAPATVCGPKKSTNLVKNKCVNFNFNGLTGTGVLTES

SEQ ID NO: 32 - DNA, 675 bp, synthetic construct
  misc_feature 1..675: note = CTD_short_e
  source 1..675: mol_type = other DNA
aatatcactaatctttgccccttcggggaagtatttaacgctactcgatttgctagcgtatatgcctggaaccggaagagaataagcaactgtgttgcagactatagcgtgctttacaattccgcatcctttagtaccttcaaatgttacggtgtgagccccaccaaactcaatgatctctgtttcacaaacgtgtacgcagatagtttcgttatacgcggggacgaagtacggcagatagcccctggccagacaggaaagatagccgattacaactacaaacttccagacgattttacagggtgtgtgatcgcttggaattcaaataacctggactccaaagtgggaggcaactataattacctgtaccgactgttccgcaaaagcaacttgaaacctttcgagcgagatatatcaaccgaaatctaccaagctggttctacaccttgtaatggtgtggagggatttaactgctacttccctcttcagtcctatggatttcagcctacaaatggagtcgggtatcaaccctatagagtcgtggtgttgtcatttgaacttctccatgcacctgctactgtctgtggtccaaaaaagtccactaatcttgtaaaaaacaaatgcgtgaacttcaatttcaatggcctcaccggaacaggtgttttgacagaatct

SEQ ID NO: 33 - protein, 260 aa, synthetic construct
  REGION 1..260: note = CTD_short_f
RVQPTESIVRFPNITNLCPFGEVFNATRFASVYAWNRKRISNCVADYSVLYNSASFSTFKCYGVSPTKLNDLCFTNVYADSFVIRGDEVRQIAPGQTGKIADYNYKLPDDFTGCVIAWNSNNLDSKVGGNYNYLYRLFRKSNLKPFERDISTEIYQAGSTPCNGVEGFNCYFPLQSYGFQPTNGVGYQPYRVVVLSFELLHAPATVCGPKKSTNLVKNKCVNFNFNGLTGTGVLTESNKKFLPFQQFGRDIADTTDAVRD

SEQ ID NO: 34 - DNA, 780 bp, synthetic construct
  misc_feature 1..780: note = CTD_short_f
  source 1..780: mol_type = other DNA
agggttcagcccaccgaatcaatagtacggttcccaaatatcactaatctttgccccttcggggaagtatttaacgctactcgatttgctagcgtatatgcctggaaccggaagagaataagcaactgtgttgcagactatagcgtgctttacaattccgcatcctttagtaccttcaaatgttacggtgtgagccccaccaaactcaatgatctctgtttcacaaacgtgtacgcagatagtttcgttatacgcggggacgaagtacggcagatagcccctggccagacaggaaagatagccgattacaactacaaacttccagacgattttacagggtgtgtgatcgcttggaattcaaataacctggactccaaagtgggaggcaactataattacctgtaccgactgttccgcaaaagcaacttgaaacctttcgagcgagatatatcaaccgaaatctaccaagctggttctacaccttgtaatggtgtggagggatttaactgctacttccctcttcagtcctatggatttcagcctacaaatggagtcgggtatcaaccctatagagtcgtggtgttgtcatttgaacttctccatgcacctgctactgtctgtggtccaaaaaagtccactaatcttgtaaaaaacaaatgcgtgaacttcaatttcaatggcctcaccggaacaggtgttttgacagaatctaacaaaaaattccttcccttccagcaattcgggagagatatcgctgacacaaccgacgccgtaagagat

SEQ ID NO: 35 - protein, 250 aa, synthetic construct
  REGION 1..250: note = CTD_short_g
RVQPTESIVRFPNITNLCPFGEVFNATRFASVYAWNRKRISNCVADYSVLYNSASFSTFKCYGVSPTKLNDLCFTNVYADSFVIRGDEVRQIAPGQTGKIADYNYKLPDDFTGCVIAWNSNNLDSKVGGNYNYLYRLFRKSNLKPFERDISTEIYQAGSTPCNGVEGFNCYFPLQSYGFQPTNGVGYQPYRVVVLSFELLHAPATVCGPKKSTNLVKNKCVNFNFNGLTGTGVLTESNKKFLPFQQFGRD

SEQ ID NO: 36 - DNA, 750 bp, synthetic construct
  misc_feature 1..750: note = CTD_short_g
  source 1..750: mol_type = other DNA
agggttcagcccaccgaatcaatagtacggttcccaaatatcactaatctttgccccttcggggaagtatttaacgctactcgatttgctagcgtatatgcctggaaccggaagagaataagcaactgtgttgcagactatagcgtgctttacaattccgcatcctttagtaccttcaaatgttacggtgtgagccccaccaaactcaatgatctctgtttcacaaacgtgtacgcagatagtttcgttatacgcggggacgaagtacggcagatagcccctggccagacaggaaagatagccgattacaactacaaacttccagacgattttacagggtgtgtgatcgcttggaattcaaataacctggactccaaagtgggaggcaactataattacctgtaccgactgttccgcaaaagcaacttgaaacctttcgagcgagatatatcaaccgaaatctaccaagctggttctacaccttgtaatggtgtggagggatttaactgctacttccctcttcagtcctatggatttcagcctacaaatggagtcgggtatcaaccctatagagtcgtggtgttgtcatttgaacttctccatgcacctgctactgtctgtggtccaaaaaagtccactaatcttgtaaaaaacaaatgcgtgaacttcaatttcaatggcctcaccggaacaggtgttttgacagaatctaacaaaaaattccttcccttccagcaattcgggagagat

SEQ ID NO: 37 - protein, 237 aa, synthetic construct
  REGION 1..237: note = CTD_short_h
RVQPTESIVRFPNITNLCPFGEVFNATRFASVYAWNRKRISNCVADYSVLYNSASFSTFKCYGVSPTKLNDLCFTNVYADSFVIRGDEVRQIAPGQTGKIADYNYKLPDDFTGCVIAWNSNNLDSKVGGNYNYLYRLFRKSNLKPFERDISTEIYQAGSTPCNGVEGFNCYFPLQSYGFQPTNGVGYQPYRVVVLSFELLHAPATVCGPKKSTNLVKNKCVNFNFNGLTGTGVLTES

SEQ ID NO: 38 - DNA, 711 bp, synthetic construct
  misc_feature 1..711: note = CTD_short_h
  source 1..711: mol_type = other DNA
agggttcagcccaccgaatcaatagtacggttcccaaatatcactaatctttgccccttcggggaagtatttaacgctactcgatttgctagcgtatatgcctggaaccggaagagaataagcaactgtgttgcagactatagcgtgctttacaattccgcatcctttagtaccttcaaatgttacggtgtgagccccaccaaactcaatgatctctgtttcacaaacgtgtacgcagatagtttcgttatacgcggggacgaagtacggcagatagcccctggccagacaggaaagatagccgattacaactacaaacttccagacgattttacagggtgtgtgatcgcttggaattcaaataacctggactccaaagtgggaggcaactataattacctgtaccgactgttccgcaaaagcaacttgaaacctttcgagcgagatatatcaaccgaaatctaccaagctggttctacaccttgtaatggtgtggagggatttaactgctacttccctcttcagtcctatggatttcagcctacaaatggagtcgggtatcaaccctatagagtcgtggtgttgtcatttgaacttctccatgcacctgctactgtctgtggtccaaaaaagtccactaatcttgtaaaaaacaaatgcgtgaacttcaatttcaatggcctcaccggaacaggtgttttgacagaatct

SEQ ID NO: 39 - protein, 207 aa, synthetic construct
  REGION 1..207: note = CTD_short_i
NITNLCPFGEVFNATRFASVYAWNRKRISNCVADYSVLYNSASFSTFKCYGVSPTKLNDLCFTNVYADSFVIRGDEVRQIAPGQTGKIADYNYKLPDDFTGCVIAWNSNNLDSKVGGNYNYLYRLFRKSNLKPFERDISTEIYQAGSTPCNGVEGFNCYFPLQSYGFQPTNGVGYQPYRVVVLSFELLHAPATVCGPKKSTNLVKNK

SEQ ID NO: 40 - DNA, 621 bp, synthetic construct
  misc_feature 1..621: note = CTD_short_i
  source 1..621: mol_type = other DNA
aatatcactaatctttgccccttcggggaagtatttaacgctactcgatttgctagcgtatatgcctggaaccggaagagaataagcaactgtgttgcagactatagcgtgctttacaattccgcatcctttagtaccttcaaatgttacggtgtgagccccaccaaactcaatgatctctgtttcacaaacgtgtacgcagatagtttcgttatacgcggggacgaagtacggcagatagcccctggccagacaggaaagatagccgattacaactacaaacttccagacgattttacagggtgtgtgatcgcttggaattcaaataacctggactccaaagtgggaggcaactataattacctgtaccgactgttccgcaaaagcaacttgaaacctttcgagcgagatatatcaaccgaaatctaccaagctggttctacaccttgtaatggtgtggagggatttaactgctacttccctcttcagtcctatggatttcagcctacaaatggagtcgggtatcaaccctatagagtcgtggtgttgtcatttgaacttctccatgcacctgctactgtctgtggtccaaaaaagtccactaatcttgtaaaaaacaaa

SEQ ID NO: 41 - protein, 160 aa, synthetic construct
  REGION 1..160: note = CTD_veryshort_a
SASFSTFKCYGVSPTKLNDLCFTNVYADSFVIRGDEVRQIAPGQTGKIADYNYKLPDDFTGCVIAWNSNNLDSKVGGNYNYLYRLFRKSNLKPFERDISTEIYQAGSTPCNGVEGFNCYFPLQSYGFQPTNGVGYQPYRVVVLSFELLHAPATVCGPKKS

SEQ ID NO: 42 - DNA, 480 bp, synthetic construct
  misc_feature 1..480: note = CTD_veryshort_a
  source 1..480: mol_type = other DNA
tccgcatcctttagtaccttcaaatgttacggtgtgagccccaccaaactcaatgatctctgtttcacaaacgtgtacgcagatagtttcgttatacgcggggacgaagtacggcagatagcccctggccagacaggaaagatagccgattacaactacaaacttccagacgattttacagggtgtgtgatcgcttggaattcaaataacctggactccaaagtgggaggcaactataattacctgtaccgactgttccgcaaaagcaacttgaaacctttcgagcgagatatatcaaccgaaatctaccaagctggttctacaccttgtaatggtgtggagggatttaactgctacttccctcttcagtcctatggatttcagcctacaaatggagtcgggtatcaaccctatagagtcgtggtgttgtcatttgaacttctccatgcacctgctactgtctgtggtccaaaaaagtcc

SEQ ID NO: 43 - protein, 156 aa, synthetic construct
  REGION 1..156: note = CTD_veryshort_b
STFKCYGVSPTKLNDLCFTNVYADSFVIRGDEVRQIAPGQTGKIADYNYKLPDDFTGCVIAWNSNNLDSKVGGNYNYLYRLFRKSNLKPFERDISTEIYQAGSTPCNGVEGFNCYFPLQSYGFQPTNGVGYQPYRVVVLSFELLHAPATVCGPKKS

SEQ ID NO: 44 - DNA, 468 bp, synthetic construct
  misc_feature 1..468: note = CTD_veryshort_b
  source 1..468: mol_type = other DNA
agtaccttcaaatgttacggtgtgagccccaccaaactcaatgatctctgtttcacaaacgtgtacgcagatagtttcgttatacgcggggacgaagtacggcagatagcccctggccagacaggaaagatagccgattacaactacaaacttccagacgattttacagggtgtgtgatcgcttggaattcaaataacctggactccaaagtgggaggcaactataattacctgtaccgactgttccgcaaaagcaacttgaaacctttcgagcgagatatatcaaccgaaatctaccaagctggttctacaccttgtaatggtgtggagggatttaactgctacttccctcttcagtcctatggatttcagcctacaaatggagtcgggtatcaaccctatagagtcgtggtgttgtcatttgaacttctccatgcacctgctactgtctgtggtccaaaaaagtcc

SEQ ID NO: 45 - protein, 156 aa, synthetic construct
  REGION 1..156: note = CTD_veryshort_c
SASFSTFKCYGVSPTKLNDLCFTNVYADSFVIRGDEVRQIAPGQTGKIADYNYKLPDDFTGCVIAWNSNNLDSKVGGNYNYLYRLFRKSNLKPFERDISTEIYQAGSTPCNGVEGFNCYFPLQSYGFQPTNGVGYQPYRVVVLSFELLHAPATVCG

SEQ ID NO: 46 - DNA, 468 bp, synthetic construct
  misc_feature 1..468: note = CTD_veryshort_c
  source 1..468: mol_type = other DNA
tccgcatcctttagtaccttcaaatgttacggtgtgagccccaccaaactcaatgatctctgtttcacaaacgtgtacgcagatagtttcgttatacgcggggacgaagtacggcagatagcccctggccagacaggaaagatagccgattacaactacaaacttccagacgattttacagggtgtgtgatcgcttggaattcaaataacctggactccaaagtgggaggcaactataattacctgtaccgactgttccgcaaaagcaacttgaaacctttcgagcgagatatatcaaccgaaatctaccaagctggttctacaccttgtaatggtgtggagggatttaactgctacttccctcttcagtcctatggatttcagcctacaaatggagtcgggtatcaaccctatagagtcgtggtgttgtcatttgaacttctccatgcacctgctactgtctgtggt

SEQ ID NO: 47 - protein, 167 aa, synthetic construct
  REGION 1..167: note = CTD_veryshort_d
DYSVLYNSASFSTFKCYGVSPTKLNDLCFTNVYADSFVIRGDEVRQIAPGQTGKIADYNYKLPDDFTGCVIAWNSNNLDSKVGGNYNYLYRLFRKSNLKPFERDISTEIYQAGSTPCNGVEGFNCYFPLQSYGFQPTNGVGYQPYRVVVLSFELLHAPATVCGPKKS

SEQ ID NO: 48 - DNA, 501 bp, synthetic construct
  misc_feature 1..501: note = CTD_veryshort_d
  source 1..501: mol_type = other DNA
gactatagcgtgctttacaattccgcatcctttagtaccttcaaatgttacggtgtgagccccaccaaactcaatgatctctgtttcacaaacgtgtacgcagatagtttcgttatacgcggggacgaagtacggcagatagcccctggccagacaggaaagatagccgattacaactacaaacttccagacgattttacagggtgtgtgatcgcttggaattcaaataacctggactccaaagtgggaggcaactataattacctgtaccgactgttccgcaaaagcaacttgaaacctttcgagcgagatatatcaaccgaaatctaccaagctggttctacaccttgtaatggtgtggagggatttaactgctacttccctcttcagtcctatggatttcagcctacaaatggagtcgggtatcaaccctatagagtcgtggtgttgtcatttgaacttctccatgcacctgctactgtctgtggtccaaaaaagtcc

SEQ ID NO: 49 - protein, 163 aa, synthetic construct
  REGION 1..163: note = CTD_veryshort_e
DYSVLYNSASFSTFKCYGVSPTKLNDLCFTNVYADSFVIRGDEVRQIAPGQTGKIADYNYKLPDDFTGCVIAWNSNNLDSKVGGNYNYLYRLFRKSNLKPFERDISTEIYQAGSTPCNGVEGFNCYFPLQSYGFQPTNGVGYQPYRVVVLSFELLHAPATVCG

SEQ ID NO: 50 - DNA, 489 bp, synthetic construct
  misc_feature 1..489: note = CTD_veryshort_e
  source 1..489: mol_type = other DNA
gactatagcgtgctttacaattccgcatcctttagtaccttcaaatgttacggtgtgagccccaccaaactcaatgatctctgtttcacaaacgtgtacgcagatagtttcgttatacgcggggacgaagtacggcagatagcccctggccagacaggaaagatagccgattacaactacaaacttccagacgattttacagggtgtgtgatcgcttggaattcaaataacctggactccaaagtgggaggcaactataattacctgtaccgactgttccgcaaaagcaacttgaaacctttcgagcgagatatatcaaccgaaatctaccaagctggttctacaccttgtaatggtgtggagggatttaactgctacttccctcttcagtcctatggatttcagcctacaaatggagtcgggtatcaaccctatagagtcgtggtgttgtcatttgaacttctccatgcacctgctactgtctgtggt

SEQ ID NO: 51 - protein, 70 aa, synthetic construct
  REGION 1..70: note = RBD_a
NSNNLDSKVGGNYNYLYRLFRKSNLKPFERDISTEIYQAGSTPCNGVEGFNCYFPLQSYGFQPTNGVGYQ

SEQ ID NO: 52 - DNA, 210 bp, synthetic construct
  misc_feature 1..210: note = RBD_a
  source 1..210: mol_type = other DNA
aattcaaataacctggactccaaagtgggaggcaactataattacctgtaccgactgttccgcaaaagcaacttgaaacctttcgagcgagatatatcaaccgaaatctaccaagctggttctacaccttgtaatggtgtggagggatttaactgctacttccctcttcagtcctatggatttcagcctacaaatggagtcgggtatcaa

SEQ ID NO: 53 - protein, 122 aa, synthetic construct
  REGION 1..122: note = RBD_b
TKLNDLCFTNVYADSFVIRGDEVRQIAPGQTGKIADYNYKLPDDFTGCVIAWNSNNLDSKVGGNYNYLYRLFRKSNLKPFERDISTEIYQAGSTPCNGVEGFNCYFPLQSYGFQPTNGVGYQ

SEQ ID NO: 54 - DNA, 366 bp, synthetic construct
  misc_feature 1..366: note = RBD_b
  source 1..366: mol_type = other DNA
accaaactcaatgatctctgtttcacaaacgtgtacgcagatagtttcgttatacgcggggacgaagtacggcagatagcccctggccagacaggaaagatagccgattacaactacaaacttccagacgattttacagggtgtgtgatcgcttggaattcaaataacctggactccaaagtgggaggcaactataattacctgtaccgactgttccgcaaaagcaacttgaaacctttcgagcgagatatatcaaccgaaatctaccaagctggttctacaccttgtaatggtgtggagggatttaactgctacttccctcttcagtcctatggatttcagcctacaaatggagtcgggtatcaa

SEQ ID NO: 55 - protein, 80 aa, synthetic construct
  REGION 1..80: note = RBD_c
NSNNLDSKVGGNYNYLYRLFRKSNLKPFERDISTEIYQAGSTPCNGVEGFNCYFPLQSYGFQPTNGVGYQPYRVVVLSFE

SEQ ID NO: 56 - DNA, 240 bp, synthetic construct
  misc_feature 1..240: note = RBD_c
  source 1..240: mol_type = other DNA
aattcaaataacctggactccaaagtgggaggcaactataattacctgtaccgactgttccgcaaaagcaacttgaaacctttcgagcgagatatatcaaccgaaatctaccaagctggttctacaccttgtaatggtgtggagggatttaactgctacttccctcttcagtcctatggatttcagcctacaaatggagtcgggtatcaaccctatagagtcgtggtgttgtcatttgaa

SEQ ID NO: 57 - protein, 58 aa, synthetic construct
  REGION 1..58: note = RBD_d
GVSPTKLNDLCFTNVYADSFVIRGDEVRQIAPGQTGKIADYNYKLPDDFTGCVIAWNS

SEQ ID NO: 58 - DNA, 174 bp, synthetic construct
  misc_feature 1..174: note = RBD_d
  source 1..174: mol_type = other DNA
ggtgtgagccccaccaaactcaatgatctctgtttcacaaacgtgtacgcagatagtttcgttatacgcggggacgaagtacggcagatagcccctggccagacaggaaagatagccgattacaactacaaacttccagacgattttacagggtgtgtgatcgcttggaattca

SEQ ID NO: 59 - protein, 76 aa, synthetic construct
  REGION 1..76: note = RBD_e
IAWNSNNLDSKVGGNYNYLYRLFRKSNLKPFERDISTEIYQAGSTPCNGVEGFNCYFPLQSYGFQPTNGVGYQPYR

SEQ ID NO: 60 - DNA, 228 bp, synthetic construct
  misc_feature 1..228: note = RBD_e
  source 1..228: mol_type = other DNA
atcgcttggaattcaaataacctggactccaaagtgggaggcaactataattacctgtaccgactgttccgcaaaagcaacttgaaacctttcgagcgagatatatcaaccgaaatctaccaagctggttctacaccttgtaatggtgtggagggatttaactgctacttccctcttcagtcctatggatttcagcctacaaatggagtcgggtatcaaccctataga

SEQ ID NO: 61 - protein, 294 aa, synthetic construct
  REGION 1..294: note = NTD_long_a
VNLTTRTQLPPAYTNSFTRGVYYPDKVFRSSVLHSTQDLFLPFFSNVTWFHAIHVSGTNGTKRFDNPVLPFNDGVYFASTEKSNIIRGWIFGTTLDSKTQSLLIVNNATNVVIKVCEFQFCNDPFLGVYYHKNNKSWMESEFRVYSSANNCTFEYVSQPFLMDLEGKQGNFKNLREFVFKNIDGYFKIYSKHTPINLVRDLPQGFSALEPLVDLPIGINITRFQTLLALHRSYLTPGDSSSGWTAGAAAYYVGYLQPRTFLLKYNENGTITDAVDCALDPLSETKCTLKSFTVE

SEQ ID NO: 62 - DNA, 882 bp, synthetic construct
  misc_feature 1..882: note = NTD_long_a
  source 1..882: mol_type = other DNA
gtgaatcttactacacgtacacagctgccaccagcctataccaacagttttactcgtggtgtatactaccccgataaggtttttcgctcttccgtgctccatagtacacaggatctcttcctgccattcttcagtaatgtcacctggtttcatgctattcatgtgtctggaactaatggaaccaagcgctttgataatccagtactcccttttaatgacggagtttacttcgcaagcacagaaaagtccaatatcatacgcgggtggattttcggaactaccctcgactccaagactcaatcactccttatagtcaataacgccaccaatgtggtcatcaaagtctgtgaatttcaattttgcaacgacccattcctgggcgtctactatcataaaaacaataagagctggatggaatccgaatttagagtatacagttctgctaataattgcacattcgaatatgtatcccaacccttccttatggatttggagggcaagcaaggcaatttcaaaaacttgcgggaatttgtcttcaaaaacatagatgggtacttcaaaatttatagtaagcatacacctattaacttggttcgagacttgcctcagggcttcagcgcccttgaacctcttgtggatttgccaatcggcatcaatataacacgatttcagacactcttggcactgcatcgttcctacctgactccaggagactctagctctggttggacagcaggcgccgctgcttactatgtcggctacttgcaacctcgaacattccttctcaaatataacgaaaatggaactatcacagatgccgtggattgtgccttggaccctctctcagagactaagtgtaccctcaagtctttcactgtggag

SEQ ID NO: 63 - protein, 264 aa, synthetic construct
  REGION 1..264: note = NTD_short_a
RGVYYPDKVFRSSVLHSTQDLFLPFFSNVTWFHAIHVSGTNGTKRFDNPVLPFNDGVYFASTEKSNIIRGWIFGTTLDSKTQSLLIVNNATNVVIKVCEFQFCNDPFLGVYYHKNNKSWMESEFRVYSSANNCTFEYVSQPFLMDLEGKQGNFKNLREFVFKNIDGYFKIYSKHTPINLVRDLPQGFSALEPLVDLPIGINITRFQTLLALHRSYLTPGDSSSGWTAGAAAYYVGYLQPRTFLLKYNENGTITDAVDCALDPLS

SEQ ID NO: 64 - DNA, 792 bp, synthetic construct
  misc_feature 1..792: note = NTD_short_a
  source 1..792: mol_type = other DNA
cgtggtgtatactaccccgataaggtttttcgctcttccgtgctccatagtacacaggatctcttcctgccattcttcagtaatgtcacctggtttcatgctattcatgtgtctggaactaatggaaccaagcgctttgataatccagtactcccttttaatgacggagtttacttcgcaagcacagaaaagtccaatatcatacgcgggtggattttcggaactaccctcgactccaagactcaatcactccttatagtcaataacgccaccaatgtggtcatcaaagtctgtgaatttcaattttgcaacgacccattcctgggcgtctactatcataaaaacaataagagctggatggaatccgaatttagagtatacagttctgctaataattgcacattcgaatatgtatcccaacccttccttatggatttggagggcaagcaaggcaatttcaaaaacttgcgggaatttgtcttcaaaaacatagatgggtacttcaaaatttatagtaagcatacacctattaacttggttcgagacttgcctcagggcttcagcgcccttgaacctcttgtggatttgccaatcggcatcaatataacacgatttcagacactcttggcactgcatcgttcctacctgactccaggagactctagctctggttggacagcaggcgccgctgcttactatgtcggctacttgcaacctcgaacattccttctcaaatataacgaaaatggaactatcacagatgccgtggattgtgccttggaccctctctca

SEQ ID NO: 65 - protein, 13 aa, synthetic construct
  REGION 1..13: note = Fc1
GSGGGGDGGGGSG

SEQ ID NO: 66 - DNA, 39 bp, synthetic construct
  misc_feature 1..39: note = Fc1
  source 1..39: mol_type = other DNA
ggatccggcggcggcggtgacggtggtggcggctccgga

SEQ ID NO: 67 - protein, 19 aa, synthetic construct
  REGION 1..19: note = Fc1-TEV
GSGGGGENLYFQGGGGGSG

SEQ ID NO: 68 - DNA, 57 bp, synthetic construct
  misc_feature 1..57: note = Fc1-TEV
  source 1..57: mol_type = other DNA
ggatccggcggcggcggtgagaacctgtacttccaaggaggtggtggcggctccgga

SEQ ID NO: 69 - protein, 20 aa, synthetic construct
  REGION 1..20: note = Fc1-Rv3C
GSGGGGLEVLFQGPGGGGSG

SEQ ID NO: 70 - DNA, 60 bp, synthetic construct
  misc_feature 1..60: note = Fc1-Rv3C
  source 1..60: mol_type = other DNA
ggatccggcggcggcggtctggaggtgctgttccagggacccggtggtggcggctccgga

SEQ ID NO: 71 - protein, 227 aa, synthetic construct
  REGION 1..227: note = Human IgG1
DKTHTCPPCPAPELLGGPSVFLFPPKPKDTLMISRTPEVTCVVVDVSHEDPEVKFNWYVDGVEVHNAKTKPREEQYNSTYRVVSVLTVLHQDWLNGKEYKCKVSNKALPAPIEKTISKAKGQPREPQVYTLPPSREELTKNQVSLTCLVKGFYPSDIAVEWESNGQPENNYKTTPPVLDSDGSFFLYSKLTVDKSRWQQGNVFSCSVMHEALHNHYTQKSLSLSPGS

SEQ ID NO: 72 - DNA, 684 bp, synthetic construct
  misc_feature 1..684: note = Human IgG1
  source 1..684: mol_type = other DNA
gacaagacccacacctgccccccttgtcctgcccctgagctgctgggcggaccctccgtgtttctgttcccccccaagcccaaggacaccctgatgatcagccggacccccgaggtcacctgcgtggtggtggacgtcagccacgaggacccagaggtcaagttcaattggtatgtggacggcgtggaggtgcacaacgccaagaccaagccccgggaggaacagtacaacagcacctaccgggtggtgtccgtgctgaccgtgctgcaccaggactggctgaacggcaaagaatacaagtgcaaggtgtccaacaaggccctgcctgcccccatcgagaaaaccatcagcaaggccaagggccagcccagagaaccccaggtgtacaccctgccccctagcagggaagagctgaccaagaaccaggtgtccctgacctgtctggtcaagggcttctaccccagcgatatcgccgtggagtgggagagcaacggccagcctgagaacaactacaagaccaccccccctgtgctggacagcgacggcagcttcttcctgtacagcaagctgaccgtggacaagagccggtggcagcagggcaacgtgtttagctgcagcgtgatgcacgaggccctgcacaaccactacacccagaagagcttaagcctgtcccctggcagttga

SEQ ID NO: 73 - protein, 515 aa, synthetic construct
  REGION 1..515: note = LS2330 [CTD_short_a-Fc]
GTRVQPTESIVRFPNITNLCPFGEVFNATRFASVYAWNRKRISNCVADYSVLYNSASFSTFKCYGVSPTKLNDLCFTNVYADSFVIRGDEVRQIAPGQTGKIADYNYKLPDDFTGCVIAWNSNNLDSKVGGNYNYLYRLFRKSNLKPFERDISTEIYQAGSTPCNGVEGFNCYFPLQSYGFQPTNGVGYQPYRVVVLSFELLHAPATVCGPKKSTNLVKNKCVNFNFNGLTGTGVLTESNKKFLPFQQFGRDIADTTDAVRDPQTLEILDITPCSGSGGGGDGGGGSGDKTHTCPPCPAPELLGGPSVFLFPPKPKDTLMISRTPEVTCVVVDVSHEDPEVKFNWYVDGVEVHNAKTKPREEQYNSTYRVVSVLTVLHQDWLNGKEYKCKVSNKALPAPIEKTISKAKGQPREPQVYTLPPSREELTKNQVSLTCLVKGFYPSDIAVEWESNGQPENNYKTTPPVLDSDGSFFLYSKLTVDKSRWQQGNVFSCSVMHEALHNHYTQKSLSLSPGS

SEQ ID NO: 74 - DNA, 1557 bp, synthetic construct
  misc_feature 1..1557: note = LS2330 [CTD_short_a-Fc]
  source 1..1557: mol_type = other DNA
ggtaccagggttcagcccaccgaatcaatagtacggttcccaaatatcactaatctttgccccttcggggaagtatttaacgctactcgatttgctagcgtatatgcctggaaccggaagagaataagcaactgtgttgcagactatagcgtgctttacaattccgcatcctttagtaccttcaaatgttacggtgtgagccccaccaaactcaatgatctctgtttcacaaacgtgtacgcagatagtttcgttatacgcggggacgaagtacggcagatagcccctggccagacaggaaagatagccgattacaactacaaacttccagacgattttacagggtgtgtgatcgcttggaattcaaataacctggactccaaagtgggaggcaactataattacctgtaccgactgttccgcaaaagcaacttgaaacctttcgagcgagatatatcaaccgaaatctaccaagctggttctacaccttgtaatggtgtggagggatttaactgctacttccctcttcagtcctatggatttcagcctacaaatggagtcgggtatcaaccctatagagtcgtggtgttgtcatttgaacttctccatgcacctgctactgtctgtggtccaaaaaagtccactaatcttgtaaaaaacaaatgcgtgaacttcaatttcaatggcctcaccggaacaggtgttttgacagaatctaacaaaaaattccttcccttccagcaattcgggagagatatcgctgacacaaccgacgccgtaagagatccccagactcttgagatccttgacatcaccccatgcagtggatccggcggcggcggtgacggtggtggcggctccggagacaagacccacacctgccccccttgtcctgcccctgagctgctgggcggaccctccgtgtttctgttcccccccaagcccaaggacaccctgatgatcagccggacccccgaggtcacctgcgtggtggtggacgtcagccacgaggacccagaggtcaagttcaattggtatgtggacggcgtggaggtgcacaacgccaagaccaagccccgggaggaacagtacaacagcacctaccgggtggtgtccgtgctgaccgtgctgcaccaggactggctgaacggcaaagaatacaagtgcaaggtgtccaacaaggccctgcctgcccccatcgagaaaaccatcagcaaggccaagggccagcccagagaaccccaggtgtacaccctgccccctagcagggaagagctgaccaagaaccaggtgtccctgacctgtctggtcaagggcttctaccccagcgatatcgccgtggagtgggagagcaacggccagcctgagaacaactacaagaccaccccccctgtgctggacagcgacggcagcttcttcctgtacagcaagctgaccgtggacaagagccggtggcagcagggcaacgtgtttagctgcagcgtgatgcacgaggccctgcacaaccactacacccagaagagcttaagcctgtcccctggcagttgataactcgag

SEQ ID NO: 75 - protein, 579 aa, synthetic construct
  REGION 1..579: note = LS3472, LS3473, LS3474 [CTD_long_a-Fc]
GTTLKSFTVEKGIYQTSNFRVQPTESIVRFPNITNLCPFGEVFNATRFASVYAWNRKRISNCVADYSVLYNSASFSTFKCYGVSPTKLNDLCFTNVYADSFVIRGDEVRQIAPGQTGKIADYNYKLPDDFTGCVIAWNSNNLDSKVGGNYNYLYRLFRKSNLKPFERDISTEIYQAGSTPCNGVEGFNCYFPLQSYGFQPTNGVGYQPYRVVVLSFELLHAPATVCGPKKSTNLVKNKCVNFNFNGLTGTGVLTESNKKFLPFQQFGRDIADTTDAVRDPQTLEILDITPCSFGGVSVITPGTNTSNQVAVLYQDVNCTEVPVAIHADQLTPTWRVYSTGSGGGGDGGGGSGDKTHTCPPCPAPELLGGPSVFLFPPKPKDTLMISRTPEVTCVVVDVSHEDPEVKFNWYVDGVEVHNAKTKPREEQYNSTYRVVSVLTVLHQDWLNGKEYKCKVSNKALPAPIEKTISKAKGQPREPQVYTLPPSREELTKNQVSLTCLVKGFYPSDIAVEWESNGQPENNYKTTPPVLDSDGSFFLYSKLTVDKSRWQQGNVFSCSVMHEALHNHYTQKSLSLSPGS

SEQ ID NO: 76 - DNA, 1749 bp, synthetic construct
  misc_feature 1..1749: note = LS3472, LS3473, LS3474 [CTD_long_a-Fc]
  source 1..1749: mol_type = other DNA
ggtaccaccctcaagtctttcactgtggagaaagggatctatcaaaccagcaattttagggttcagcccaccgaatcaatagtacggttcccaaatatcactaatctttgccccttcggggaagtatttaacgctactcgatttgctagcgtatatgcctggaaccggaagagaataagcaactgtgttgcagactatagcgtgctttacaattccgcatcctttagtaccttcaaatgttacggtgtgagccccaccaaactcaatgatctctgtttcacaaacgtgtacgcagatagtttcgttatacgcggggacgaagtacggcagatagcccctggccagacaggaaagatagccgattacaactacaaacttccagacgattttacagggtgtgtgatcgcttggaattcaaataacctggactccaaagtgggaggcaactataattacctgtaccgactgttccgcaaaagcaacttgaaacctttcgagcgagatatatcaaccgaaatctaccaagctggttctacaccttgtaatggtgtggagggatttaactgctacttccctcttcagtcctatggatttcagcctacaaatggagtcgggtatcaaccctatagagtcgtggtgttgtcatttgaacttctccatgcacctgctactgtctgtggtccaaaaaagtccactaatcttgtaaaaaacaaatgcgtgaacttcaatttcaatggcctcaccggaacaggtgttttgacagaatctaacaaaaaattccttcccttccagcaattcgggagagatatcgctgacacaaccgacgccgtaagagatccccagactcttgagatccttgacatcaccccatgcagttttggaggcgtgtctgtgatcacccctggcacaaacacctcaaaccaggtggctgtgctgtatcaagatgtcaattgcaccgaggtgcctgtggcaatacatgctgaccagctcaccccaacctggcgagtgtactctaccggatccggcggcggcggtgacggtggtggcggctccggagacaagacccacacctgccccccttgtcctgcccctgagctgctgggcggaccctccgtgtttctgttcccccccaagcccaaggacaccctgatgatcagccggacccccgaggtcacctgcgtggtggtggacgtcagccacgaggacccagaggtcaagttcaattggtatgtggacggcgtggaggtgcacaacgccaagaccaagccccgggaggaacagtacaacagcacctaccgggtggtgtccgtgctgaccgtgctgcaccaggactggctgaacggcaaagaatacaagtgcaaggtgtccaacaaggccctgcctgcccccatcgagaaaaccatcagcaaggccaagggccagcccagagaaccccaggtgtacaccctgccccctagcagggaagagctgaccaagaaccaggtgtccctgacctgtctggtcaagggcttctaccccagcgatatcgccgtggagtgggagagcaacggccagcctgagaacaactacaagaccaccccccctgtgctggacagcgacggcagcttcttcctgtacagcaagctgaccgtggacaagagccggtggcagcagggcaacgtgtttagctgcagcgtgatgcacgaggccctgcacaaccactacacccagaagagcttaagcctgtcccctggcagttgataactcgag

SEQ ID NO: 77 - protein, 522 aa, synthetic construct
  REGION 1..522: note = LS3477 [CTD_short_a-TEV-Fc]
MGTRVQPTESIVRFPNITNLCPFGEVFNATRFASVYAWNRKRISNCVADYSVLYNSASFSTFKCYGVSPTKLNDLCFTNVYADSFVIRGDEVRQIAPGQTGKIADYNYKLPDDFTGCVIAWNSNNLDSKVGGNYNYLYRLFRKSNLKPFERDISTEIYQAGSTPCNGVEGFNCYFPLQSYGFQPTNGVGYQPYRVVVLSFELLHAPATVCGPKKSTNLVKNKCVNFNFNGLTGTGVLTESNKKFLPFQQFGRDIADTTDAVRDPQTLEILDITPCSGSGGGGENLYFQGGGGGSGDKTHTCPPCPAPELLGGPSVFLFPPKPKDTLMISRTPEVTCVVVDVSHEDPEVKFNWYVDGVEVHNAKTKPREEQYNSTYRVVSVLTVLHQDWLNGKEYKCKVSNKALPAPIEKTISKAKGQPREPQVYTLPPSREELTKNQVSLTCLVKGFYPSDIAVEWESNGQPENNYKTTPPVLDSDGSFFLYSKLTVDKSRWQQGNVFSCSVMHEALHNHYTQKSLSLSPGS

SEQ ID NO: 78 - DNA, 1578 bp, synthetic construct
  misc_feature 1..1578: note = LS3477 [CTD_short_a-TEV-Fc]
  source 1..1578: mol_type = other DNA
atgggtaccagggttcagcccaccgaatcaatagtacggttcccaaatatcactaatctttgccccttcggggaagtatttaacgctactcgatttgctagcgtatatgcctggaaccggaagagaataagcaactgtgttgcagactatagcgtgctttacaattccgcatcctttagtaccttcaaatgttacggtgtgagccccaccaaactcaatgatctctgtttcacaaacgtgtacgcagatagtttcgttatacgcggggacgaagtacggcagatagcccctggccagacaggaaagatagccgattacaactacaaacttccagacgattttacagggtgtgtgatcgcttggaattcaaataacctggactccaaagtgggaggcaactataattacctgtaccgactgttccgcaaaagcaacttgaaacctttcgagcgagatatatcaaccgaaatctaccaagctggttctacaccttgtaatggtgtggagggatttaactgctacttccctcttcagtcctatggatttcagcctacaaatggagtcgggtatcaaccctatagagtcgtggtgttgtcatttgaacttctccatgcacctgctactgtctgtggtccaaaaaagtccactaatcttgtaaaaaacaaatgcgtgaacttcaatttcaatggcctcaccggaacaggtgttttgacagaatctaacaaaaaattccttcccttccagcaattcgggagagatatcgctgacacaaccgacgccgtaagagatccccagactcttgagatccttgacatcaccccatgcagtggatccggcggcggcggtgagaacctgtacttccaaggaggtggtggcggctccggagacaagacccacacctgccccccttgtcctgcccctgagctgctgggcggaccctccgtgtttctgttcccccccaagcccaaggacaccctgatgatcagccggacccccgaggtcacctgcgtggtggtggacgtcagccacgaggacccagaggtcaagttcaattggtatgtggacggcgtggaggtgcacaacgccaagaccaagccccgggaggaacagtacaacagcacctaccgggtggtgtccgtgctgaccgtgctgcaccaggactggctgaacggcaaagaatacaagtgcaaggtgtccaacaaggccctgcctgcccccatcgagaaaaccatcagcaaggccaagggccagcccagagaaccccaggtgtacaccctgccccctagcagggaagagctgaccaagaaccaggtgtccctgacctgtctggtcaagggcttctaccccagcgatatcgccgtggagtgggagagcaacggccagcctgagaacaactacaagaccaccccccctgtgctggacagcgacggcagcttcttcctgtacagcaagctgaccgtggacaagagccggtggcagcagggcaacgtgtttagctgcagcgtgatgcacgaggccctgcacaaccactacacccagaagagcttaagcctgtcccctggcagttgataactcgag

SEQ ID NO: 79 - protein, 585 aa, synthetic construct
  REGION 1..585: note = LS3485 [CTD_long_a-TEV-Fc]
GTTLKSFTVEKGIYQTSNFRVQPTESIVRFPNITNLCPFGEVFNATRFASVYAWNRKRISNCVADYSVLYNSASFSTFKCYGVSPTKLNDLCFTNVYADSFVIRGDEVRQIAPGQTGKIADYNYKLPDDFTGCVIAWNSNNLDSKVGGNYNYLYRLFRKSNLKPFERDISTEIYQAGSTPCNGVEGFNCYFPLQSYGFQPTNGVGYQPYRVVVLSFELLHAPATVCGPKKSTNLVKNKCVNFNFNGLTGTGVLTESNKKFLPFQQFGRDIADTTDAVRDPQTLEILDITPCSFGGVSVITPGTNTSNQVAVLYQDVNCTEVPVAIHADQLTPTWRVYSTGSGGGGENLYFQGGGGGSGDKTHTCPPCPAPELLGGPSVFLFPPKPKDTLMISRTPEVTCVVVDVSHEDPEVKFNWYVDGVEVHNAKTKPREEQYNSTYRVVSVLTVLHQDWLNGKEYKCKVSNKALPAPIEKTISKAKGQPREPQVYTLPPSREELTKNQVSLTCLVKGFYPSDIAVEWESNGQPENNYKTTPPVLDSDGSFFLYSKLTVDKSRWQQGNVFSCSVMHEALHNHYTQKSLSLSPGS

SEQ ID NO: 80 - DNA, 1770 bp, synthetic construct
  misc_feature 1..1770: note = LS3485 [CTD_long_a-TEV-Fc]
  source 1..1770: mol_type = other DNA
atgggtaccaccctcaagtctttcactgtggagaaagggatctatcaaaccagcaattttagggttcagcccaccgaatcaatagtacggttcccaaatatcactaatctttgccccttcggggaagtatttaacgctactcgatttgctagcgtatatgcctggaaccggaagagaataagcaactgtgttgcagactatagcgtgctttacaattccgcatcctttagtaccttcaaatgttacggtgtgagccccaccaaactcaatgatctctgtttcacaaacgtgtacgcagatagtttcgttatacgcggggacgaagtacggcagatagcccctggccagacaggaaagatagccgattacaactacaaacttccagacgattttacagggtgtgtgatcgcttggaattcaaataacctggactccaaagtgggaggcaactataattacctgtaccgactgttccgcaaaagcaacttgaaacctttcgagcgagatatatcaaccgaaatctaccaagctggttctacaccttgtaatggtgtggagggatttaactgctacttccctcttcagtcctatggatttcagcctacaaatggagtcgggtatcaaccctatagagtcgtggtgttgtcatttgaacttctccatgcacctgctactgtctgtggtccaaaaaagtccactaatcttgtaaaaaacaaatgcgtgaacttcaatttcaatggcctcaccggaacaggtgttttgacagaatctaacaaaaaattccttcccttccagcaattcgggagagatatcgctgacacaaccgacgccgtaagagatccccagactcttgagatccttgacatcaccccatgcagttttggaggcgtgtctgtgatcacccctggcacaaacacctcaaaccaggtggctgtgctgtatcaagatgtcaattgcaccgaggtgcctgtggcaatacatgctgaccagctcaccccaacctggcgagtgtactctaccggatccggcggcggcggtgagaacctgtacttccaaggaggtggtggcggctccggagacaagacccacacctgccccccttgtcctgcccctgagctgctgggcggaccctccgtgtttctgttcccccccaagcccaaggacaccctgatgatcagccggacccccgaggtcacctgcgtggtggtggacgtcagccacgaggacccagaggtcaagttcaattggtatgtggacggcgtggaggtgcacaacgccaagaccaagccccgggaggaacagtacaacagcacctaccgggtggtgtccgtgctgaccgtgctgcaccaggactggctgaacggcaaagaatacaagtgcaaggtgtccaacaaggccctgcctgcccccatcgagaaaaccatcagcaaggccaagggccagcccagagaaccccaggtgtacaccctgccccctagcagggaagagctgaccaagaaccaggtgtccctgacctgtctggtcaagggcttctaccccagcgatatcgccgtggagtgggagagcaacggccagcctgagaacaactacaagaccaccccccctgtgctggacagcgacggcagcttcttcctgtacagcaagctgaccgtggacaagagccggtggcagcagggcaacgtgtttagctgcagcgtgatgcacgaggccctgcacaaccactacacccagaagagcttaagcctgtcccctggcagttgataactcgag

SEQ ID NO: 81 - protein, 523 aa, synthetic construct
  REGION 1..523: note = LS3489 [CTD_short_a-Rv3c-Fc]
MGTRVQPTESIVRFPNITNLCPFGEVFNATRFASVYAWNRKRISNCVADYSVLYNSASFSTFKCYGVSPTKLNDLCFTNVYADSFVIRGDEVRQIAPGQTGKIADYNYKLPDDFTGCVIAWNSNNLDSKVGGNYNYLYRLFRKSNLKPFERDISTEIYQAGSTPCNGVEGFNCYFPLQSYGFQPTNGVGYQPYRVVVLSFELLHAPATVCGPKKSTNLVKNKCVNFNFNGLTGTGVLTESNKKFLPFQQFGRDIADTTDAVRDPQTLEILDITPCSGSGGGGLEVLFQGPGGGGSGDKTHTCPPCPAPELLGGPSVFLFPPKPKDTLMISRTPEVTCVVVDVSHEDPEVKFNWYVDGVEVHNAKTKPREEQYNSTYRVVSVLTVLHQDWLNGKEYKCKVSNKALPAPIEKTISKAKGQPREPQVYTLPPSREELTKNQVSLTCLVKGFYPSDIAVEWESNGQPENNYKTTPPVLDSDGSFFLYSKLTVDKSRWQQGNVFSCSVMHEALHNHYTQKSLSLSPGS

SEQ ID NO: 82 - DNA, 1581 bp, synthetic construct
  misc_feature 1..1581: note = LS3489 [CTD_short_a-Rv3c-Fc]
  source 1..1581: mol_type = other DNA
atgggtaccagggttcagcccaccgaatcaatagtacggttcccaaatatcactaatctttgccccttcggggaagtatttaacgctactcgatttgctagcgtatatgcctggaaccggaagagaataagcaactgtgttgcagactatagcgtgctttacaattccgcatcctttagtaccttcaaatgttacggtgtgagccccaccaaactcaatgatctctgtttcacaaacgtgtacgcagatagtttcgttatacgcggggacgaagtacggcagatagcccctggccagacaggaaagatagccgattacaactacaaacttccagacgattttacagggtgtgtgatcgcttggaattcaaataacctggactccaaagtgggaggcaactataattacctgtaccgactgttccgcaaaagcaacttgaaacctttcgagcgagatatatcaaccgaaatctaccaagctggttctacaccttgtaatggtgtggagggatttaactgctacttccctcttcagtcctatggatttcagcctacaaatggagtcgggtatcaaccctatagagtcgtggtgttgtcatttgaacttctccatgcacctgctactgtctgtggtccaaaaaagtccactaatcttgtaaaaaacaaatgcgtgaacttcaatttcaatggcctcaccggaacaggtgttttgacagaatctaacaaaaaattccttcccttccagcaattcgggagagatatcgctgacacaaccgacgccgtaagagatccccagactcttgagatccttgacatcaccccatgcagtggatccggcggcggcggtctggaggtgctgttccagggacccggtggtggcggctccggagacaagacccacacctgccccccttgtcctgcccctgagctgctgggcggaccctccgtgtttctgttcccccccaagcccaaggacaccctgatgatcagccggacccccgaggtcacctgcgtggtggtggacgtcagccacgaggacccagaggtcaagttcaattggtatgtggacggcgtggaggtgcacaacgccaagaccaagccccgggaggaacagtacaacagcacctaccgggtggtgtccgtgctgaccgtgctgcaccaggactggctgaacggcaaagaatacaagtgcaaggtgtccaacaaggccctgcctgcccccatcgagaaaaccatcagcaaggccaagggccagcccagagaaccccaggtgtacaccctgccccctagcagggaagagctgaccaagaaccaggtgtccctgacctgtctggtcaagggcttctaccccagcgatatcgccgtggagtgggagagcaacggccagcctgagaacaactacaagaccaccccccctgtgctggacagcgacggcagcttcttcctgtacagcaagctgaccgtggacaagagccggtggcagcagggcaacgtgtttagctgcagcgtgatgcacgaggccctgcacaaccactacacccagaagagcttaagcctgtcccctggcagttgataactcgag

SEQ ID NO: 83 - protein, 587 aa, synthetic construct
  REGION 1..587: note = LS3497 [CTD_long_a-Rv3c-Fc]
MGTTLKSFTVEKGIYQTSNFRVQPTESIVRFPNITNLCPFGEVFNATRFASVYAWNRKRISNCVADYSVLYNSASFSTFKCYGVSPTKLNDLCFTNVYADSFVIRGDEVRQIAPGQTGKIADYNYKLPDDFTGCVIAWNSNNLDSKVGGNYNYLYRLFRKSNLKPFERDISTEIYQAGSTPCNGVEGFNCYFPLQSYGFQPTNGVGYQPYRVVVLSFELLHAPATVCGPKKSTNLVKNKCVNFNFNGLTGTGVLTESNKKFLPFQQFGRDIADTTDAVRDPQTLEILDITPCSFGGVSVITPGTNTSNQVAVLYQDVNCTEVPVAIHADQLTPTWRVYSTGSGGGGLEVLFQGPGGGGSGDKTHTCPPCPAPELLGGPSVFLFPPKPKDTLMISRTPEVTCVVVDVSHEDPEVKFNWYVDGVEVHNAKTKPREEQYNSTYRVVSVLTVLHQDWLNGKEYKCKVSNKALPAPIEKTISKAKGQPREPQVYTLPPSREELTKNQVSLTCLVKGFYPSDIAVEWESNGQPENNYKTTPPVLDSDGSFFLYSKLTVDKSRWQQGNVFSCSVMHEALHNHYTQKSLSLSPGS

SEQ ID NO: 84 - DNA, 1773 bp, synthetic construct
  misc_feature 1..1773: note = LS3497 [CTD_long_a-Rv3c-Fc]
  source 1..1773: mol_type = other DNA
atgggtaccaccctcaagtctttcactgtggagaaagggatctatcaaaccagcaattttagggttcagcccaccgaatcaatagtacggttcccaaatatcactaatctttgccccttcggggaagtatttaacgctactcgatttgctagcgtatatgcctggaaccggaagagaataagcaactgtgttgcagactatagcgtgctttacaattccgcatcctttagtaccttcaaatgttacggtgtgagccccaccaaactcaatgatctctgtttcacaaacgtgtacgcagatagtttcgttatacgcggggacgaagtacggcagatagcccctggccagacaggaaagatagccgattacaactacaaacttccagacgattttacagggtgtgtgatcgcttggaattcaaataacctggactccaaagtgggaggcaactataattacctgtaccgactgttccgcaaaagcaacttgaaacctttcgagcgagatatatcaaccgaaatctaccaagctggttctacaccttgtaatggtgtggagggatttaactgctacttccctcttcagtcctatggatttcagcctacaaatggagtcgggtatcaaccctatagagtcgtggtgttgtcatttgaacttctccatgcacctgctactgtctgtggtccaaaaaagtccactaatcttgtaaaaaacaaatgcgtgaacttcaatttcaatggcctcaccggaacaggtgttttgacagaatctaacaaaaaattccttcccttccagcaattcgggagagatatcgctgacacaaccgacgccgtaagagatccccagactcttgagatccttgacatcaccccatgcagttttggaggcgtgtctgtgatcacccctggcacaaacacctcaaaccaggtggctgtgctgtatcaagatgtcaattgcaccgaggtgcctgtggcaatacatgctgaccagctcaccccaacctggcgagtgtactctaccggatccggcggcggcggtctggaggtgctgttccagggacccggtggtggcggctccggagacaagacccacacctgccccccttgtcctgcccctgagctgctgggcggaccctccgtgtttctgttcccccccaagcccaaggacaccctgatgatcagccggacccccgaggtcacctgcgtggtggtggacgtcagccacgaggacccagaggtcaagttcaattggtatgtggacggcgtggaggtgcacaacgccaagaccaagccccgggaggaacagtacaacagcacctaccgggtggtgtccgtgctgaccgtgctgcaccaggactggctgaacggcaaagaatacaagtgcaaggtgtccaacaaggccctgcctgcccccatcgagaaaaccatcagcaaggccaagggccagcccagagaaccccaggtgtacaccctgccccctagcagggaagagctgaccaagaaccaggtgtccctgacctgtctggtcaagggcttctaccccagcgatatcgccgtggagtgggagagcaacggccagcctgagaacaactacaagaccaccccccctgtgctggacagcgacggcagcttcttcctgtacagcaagctgaccgtggacaagagccggtggcagcagggcaacgtgtttagctgcagcgtgatgcacgaggccctgcacaaccactacacccagaagagcttaagcctgtcccctggcagttgataactcgag

SEQ ID NO: 85 - protein, 358 aa, synthetic construct
  REGION 1..358: note = LS2316, LS2317, LS2318, LS2319 [CTD_long_a-His
TLKSFTVEKGIYQTSNFRVQPTESIVRFPNITNLCPFGEVFNATRFASVYAWNRKRISNCVADYSVLYNSASFSTFKCYGVSPTKLNDLCFTNVYADSFVIRGDEVRQIAPGQTGKIADYNYKLPDDFTGCVIAWNSNNLDSKVGGNYNYLYRLFRKSNLKPFERDISTEIYQAGSTPCNGVEGFNCYFPLQSYGFQPTNGVGYQPYRVVVLSFELLHAPATVCGPKKSTNLVKNKCVNFNFNGLTGTGVLTESNKKFLPFQQFGRDIADTTDAVRDPQTLEILDITPCSFGGVSVITPGTNTSNQVAVLYQDVNCTEVPVAIHADQLTPTWRVYSTGSSGGGGSGGGGSHHHHHHHH

SEQ ID NO: 86 - DNA, 1086 bp, synthetic construct
  misc_feature 1..1086: note = LS2316, LS2317, LS2318, LS2319 [CTD_long_a-His
  source 1..1086: mol_type = other DNA
accctcaagtctttcactgtggagaaagggatctatcaaaccagcaattttagggttcagcccaccgaatcaatagtacggttcccaaatatcactaatctttgccccttcggggaagtatttaacgctactcgatttgctagcgtatatgcctggaaccggaagagaataagcaactgtgttgcagactatagcgtgctttacaattccgcatcctttagtaccttcaaatgttacggtgtgagccccaccaaactcaatgatctctgtttcacaaacgtgtacgcagatagtttcgttatacgcggggacgaagtacggcagatagcccctggccagacaggaaagatagccgattacaactacaaacttccagacgattttacagggtgtgtgatcgcttggaattcaaataacctggactccaaagtgggaggcaactataattacctgtaccgactgttccgcaaaagcaacttgaaacctttcgagcgagatatatcaaccgaaatctaccaagctggttctacaccttgtaatggtgtggagggatttaactgctacttccctcttcagtcctatggatttcagcctacaaatggagtcgggtatcaaccctatagagtcgtggtgttgtcatttgaacttctccatgcacctgctactgtctgtggtccaaaaaagtccactaatcttgtaaaaaacaaatgcgtgaacttcaatttcaatggcctcaccggaacaggtgttttgacagaatctaacaaaaaattccttcccttccagcaattcgggagagatatcgctgacacaaccgacgccgtaagagatccccagactcttgagatccttgacatcaccccatgcagttttggaggcgtgtctgtgatcacccctggcacaaacacctcaaaccaggtggctgtgctgtatcaagatgtcaattgcaccgaggtgcctgtggcaatacatgctgaccagctcaccccaacctggcgagtgtactctaccggaagtagtggaggtggaggcagtggaggcggaggtagtcatcatcatcaccaccaccatcactgataactcgag

SEQ ID NO: 87 - protein, 513 aa, synthetic construct
  REGION 1..513: note = LS3479 [NTD_short_a-TEV-Fc]
MGTRGVYYPDKVFRSSVLHSTQDLFLPFFSNVTWFHAIHVSGTNGTKRFDNPVLPFNDGVYFASTEKSNIIRGWIFGTTLDSKTQSLLIVNNATNVVIKVCEFQFCNDPFLGVYYHKNNKSWMESEFRVYSSANNCTFEYVSQPFLMDLEGKQGNFKNLREFVFKNIDGYFKIYSKHTPINLVRDLPQGFSALEPLVDLPIGINITRFQTLLALHRSYLTPGDSSSGWTAGAAAYYVGYLQPRTFLLKYNENGTITDAVDCALDPLSGSGGGGENLYFQGGGGGSGDKTHTCPPCPAPELLGGPSVFLFPPKPKDTLMISRTPEVTCVVVDVSHEDPEVKFNWYVDGVEVHNAKTKPREEQYNSTYRVVSVLTVLHQDWLNGKEYKCKVSNKALPAPIEKTISKAKGQPREPQVYTLPPSREELTKNQVSLTCLVKGFYPSDIAVEWESNGQPENNYKTTPPVLDSDGSFFLYSKLTVDKSRWQQGNVFSCSVMHEALHNHYTQKSLSLSPGS

SEQ ID NO: 88 - DNA, 1551 bp, synthetic construct
  misc_feature 1..1551: note = LS3479 [NTD_short_a-TEV-Fc]
  source 1..1551: mol_type = other DNA
atgggtacccgtggtgtatactaccccgataaggtttttcgctcttccgtgctccatagtacacaggatctcttcctgccattcttcagtaatgtcacctggtttcatgctattcatgtgtctggaactaatggaaccaagcgctttgataatccagtactcccttttaatgacggagtttacttcgcaagcacagaaaagtccaatatcatacgcgggtggattttcggaactaccctcgactccaagactcaatcactccttatagtcaataacgccaccaatgtggtcatcaaagtctgtgaatttcaattttgcaacgacccattcctgggcgtctactatcataaaaacaataagagctggatggaatccgaatttagagtatacagttctgctaataattgcacattcgaatatgtatcccaacccttccttatggatttggagggcaagcaaggcaatttcaaaaacttgcgggaatttgtcttcaaaaacatagatgggtacttcaaaatttatagtaagcatacacctattaacttggttcgagacttgcctcagggcttcagcgcccttgaacctcttgtggatttgccaatcggcatcaatataacacgatttcagacactcttggcactgcatcgttcctacctgactccaggagactctagctctggttggacagcaggcgccgctgcttactatgtcggctacttgcaacctcgaacattccttctcaaatataacgaaaatggaactatcacagatgccgtggattgtgccttggaccctctctcaggatccggcggcggcggtgagaacctgtacttccaaggaggtggtggcggctccggagacaagacccacacctgccccccttgtcctgcccctgagctgctgggcggaccctccgtgtttctgttcccccccaagcccaaggacaccctgatgatcagccggacccccgaggtcacctgcgtggtggtggacgtcagccacgaggacccagaggtcaagttcaattggtatgtggacggcgtggaggtgcacaacgccaagaccaagccccgggaggaacagtacaacagcacctaccgggtggtgtccgtgctgaccgtgctgcaccaggactggctgaacggcaaagaatacaagtgcaaggtgtccaacaaggccctgcctgcccccatcgagaaaaccatcagcaaggccaagggccagcccagagaaccccaggtgtacaccctgccccctagcagggaagagctgaccaagaaccaggtgtccctgacctgtctggtcaagggcttctaccccagcgatatcgccgtggagtgggagagcaacggccagcctgagaacaactacaagaccaccccccctgtgctggacagcgacggcagcttcttcctgtacagcaagctgaccgtggacaagagccggtggcagcagggcaacgtgtttagctgcagcgtgatgcacgaggccctgcacaaccactacacccagaagagcttaagcctgtcccctggcagttgataactcgag

SEQ ID NO: 89 - protein, 543 aa, synthetic construct
  REGION 1..543: note = LS3475 [NTD_long_a-TEV-Fc]
MGTVNLTTRTQLPPAYTNSFTRGVYYPDKVFRSSVLHSTQDLFLPFFSNVTWFHAIHVSGTNGTKRFDNPVLPFNDGVYFASTEKSNIIRGWIFGTTLDSKTQSLLIVNNATNVVIKVCEFQFCNDPFLGVYYHKNNKSWMESEFRVYSSANNCTFEYVSQPFLMDLEGKQGNFKNLREFVFKNIDGYFKIYSKHTPINLVRDLPQGFSALEPLVDLPIGINITRFQTLLALHRSYLTPGDSSSGWTAGAAAYYVGYLQPRTFLLKYNENGTITDAVDCALDPLSETKCTLKSFTVEGSGGGGENLYFQGGGGGSGDKTHTCPPCPAPELLGGPSVFLFPPKPKDTLMISRTPEVTCVVVDVSHEDPEVKFNWYVDGVEVHNAKTKPREEQYNSTYRVVSVLTVLHQDWLNGKEYKCKVSNKALPAPIEKTISKAKGQPREPQVYTLPPSREELTKNQVSLTCLVKGFYPSDIAVEWESNGQPENNYKTTPPVLDSDGSFFLYSKLTVDKSRWQQGNVFSCSVMHEALHNHYTQKSLSLSPGS

SEQ ID NO: 90 - DNA, 1641 bp, synthetic construct
  misc_feature 1..1641: note = LS3475 [NTD_long_a-TEV-Fc]
  source 1..1641: mol_type = other DNA
atgggtaccgtgaatcttactacacgtacacagctgccaccagcctataccaacagttttactcgtggtgtatactaccccgataaggtttttcgctcttccgtgctccatagtacacaggatctcttcctgccattcttcagtaatgtcacctggtttcatgctattcatgtgtctggaactaatggaaccaagcgctttgataatccagtactcccttttaatgacggagtttacttcgcaagcacagaaaagtccaatatcatacgcgggtggattttcggaactaccctcgactccaagactcaatcactccttatagtcaataacgccaccaatgtggtcatcaaagtctgtgaatttcaattttgcaacgacccattcctgggcgtctactatcataaaaacaataagagctggatggaatccgaatttagagtatacagttctgctaataattgcacattcgaatatgtatcccaacccttccttatggatttggagggcaagcaaggcaatttcaaaaacttgcgggaatttgtcttcaaaaacatagatgggtacttcaaaatttatagtaagcatacacctattaacttggttcgagacttgcctcagggcttcagcgcccttgaacctcttgtggatttgccaatcggcatcaatataacacgatttcagacactcttggcactgcatcgttcctacctgactccaggagactctagctctggttggacagcaggcgccgctgcttactatgtcggctacttgcaacctcgaacattccttctcaaatataacgaaaatggaactatcacagatgccgtggattgtgccttggaccctctctcagagactaagtgtaccctcaagtctttcactgtggagggatccggcggcggcggtgagaacctgtacttccaaggaggtggtggcggctccggagacaagacccacacctgccccccttgtcctgcccctgagctgctgggcggaccctccgtgtttctgttcccccccaagcccaaggacaccctgatgatcagccggacccccgaggtcacctgcgtggtggtggacgtcagccacgaggacccagaggtcaagttcaattggtatgtggacggcgtggaggtgcacaacgccaagaccaagccccgggaggaacagtacaacagcacctaccgggtggtgtccgtgctgaccgtgctgcaccaggactggctgaacggcaaagaatacaagtgcaaggtgtccaacaaggccctgcctgcccccatcgagaaaaccatcagcaaggccaagggccagcccagagaaccccaggtgtacaccctgccccctagcagggaagagctgaccaagaaccaggtgtccctgacctgtctggtcaagggcttctaccccagcgatatcgccgtggagtgggagagcaacggccagcctgagaacaactacaagaccaccccccctgtgctggacagcgacggcagcttcttcctgtacagcaagctgaccgtggacaagagccggtggcagcagggcaacgtgtttagctgcagcgtgatgcacgaggccctgcacaaccactacacccagaagagcttaagcctgtcccctggcagttgataactcgag

SEQ ID NO: 91 - protein, 514 aa, synthetic construct
  REGION 1..514: note = LS3491 [NTD_short_a-Rv3c-Fc]
MGTRGVYYPDKVFRSSVLHSTQDLFLPFFSNVTWFHAIHVSGTNGTKRFDNPVLPFNDGVYFASTEKSNIIRGWIFGTTLDSKTQSLLIVNNATNVVIKVCEFQFCNDPFLGVYYHKNNKSWMESEFRVYSSANNCTFEYVSQPFLMDLEGKQGNFKNLREFVFKNIDGYFKIYSKHTPINLVRDLPQGFSALEPLVDLPIGINITRFQTLLALHRSYLTPGDSSSGWTAGAAAYYVGYLQPRTFLLKYNENGTITDAVDCALDPLSGSGGGGLEVLFQGPGGGGSGDKTHTCPPCPAPELLGGPSVFLFPPKPKDTLMISRTPEVTCVVVDVSHEDPEVKFNWYVDGVEVHNAKTKPREEQYNSTYRVVSVLTVLHQDWLNGKEYKCKVSNKALPAPIEKTISKAKGQPREPQVYTLPPSREELTKNQVSLTCLVKGFYPSDIAVEWESNGQPENNYKTTPPVLDSDGSFFLYSKLTVDKSRWQQGNVFSCSVMHEALHNHYTQKSLSLSPGS

SEQ ID NO: 92 - DNA, 1554 bp, synthetic construct
  misc_feature 1..1554: note = LS3491 [NTD_short_a-Rv3c-Fc]
  source 1..1554: mol_type = other DNA
atgggtacccgtggtgtatactaccccgataaggtttttcgctcttccgtgctccatagtacacaggatctcttcctgccattcttcagtaatgtcacctggtttcatgctattcatgtgtctggaactaatggaaccaagcgctttgataatccagtactcccttttaatgacggagtttacttcgcaagcacagaaaagtccaatatcatacgcgggtggattttcggaactaccctcgactccaagactcaatcactccttatagtcaataacgccaccaatgtggtcatcaaagtctgtgaatttcaattttgcaacgacccattcctgggcgtctactatcataaaaacaataagagctggatggaatccgaatttagagtatacagttctgctaataattgcacattcgaatatgtatcccaacccttccttatggatttggagggcaagcaaggcaatttcaaaaacttgcgggaatttgtcttcaaaaacatagatgggtacttcaaaatttatagtaagcatacacctattaacttggttcgagacttgcctcagggcttcagcgcccttgaacctcttgtggatttgccaatcggcatcaatataacacgatttcagacactcttggcactgcatcgttcctacctgactccaggagactctagctctggttggacagcaggcgccgctgcttactatgtcggctacttgcaacctcgaacattccttctcaaatataacgaaaatggaactatcacagatgccgtggattgtgccttggaccctctctcaggatccggcggcggcggtctggaggtgctgttccagggacccggtggtggcggctccggagacaagacccacacctgccccccttgtcctgcccctgagctgctgggcggaccctccgtgtttctgttcccccccaagcccaaggacaccctgatgatcagccggacccccgaggtcacctgcgtggtggtggacgtcagccacgaggacccagaggtcaagttcaattggtatgtggacggcgtggaggtgcacaacgccaagaccaagccccgggaggaacagtacaacagcacctaccgggtggtgtccgtgctgaccgtgctgcaccaggactggctgaacggcaaagaatacaagtgcaaggtgtccaacaaggccctgcctgcccccatcgagaaaaccatcagcaaggccaagggccagcccagagaaccccaggtgtacaccctgccccctagcagggaagagctgaccaagaaccaggtgtccctgacctgtctggtcaagggcttctaccccagcgatatcgccgtggagtgggagagcaacggccagcctgagaacaactacaagaccaccccccctgtgctggacagcgacggcagcttcttcctgtacagcaagctgaccgtggacaagagccggtggcagcagggcaacgtgtttagctgcagcgtgatgcacgaggccctgcacaaccactacacccagaagagcttaagcctgtcccctggcagttgataactcgag

SEQ ID NO: 93 - protein, 544 aa, synthetic construct
  REGION 1..544: note = LS3487 [NTD_long_a-Rv3C-Fc]
MGTVNLTTRTQLPPAYTNSFTRGVYYPDKVFRSSVLHSTQDLFLPFFSNVTWFHAIHVSGTNGTKRFDNPVLPFNDGVYFASTEKSNIIRGWIFGTTLDSKTQSLLIVNNATNVVIKVCEFQFCNDPFLGVYYHKNNKSWMESEFRVYSSANNCTFEYVSQPFLMDLEGKQGNFKNLREFVFKNIDGYFKIYSKHTPINLVRDLPQGFSALEPLVDLPIGINITRFQTLLALHRSYLTPGDSSSGWTAGAAAYYVGYLQPRTFLLKYNENGTITDAVDCALDPLSETKCTLKSFTVEGSGGGGLEVLFQGPGGGGSGDKTHTCPPCPAPELLGGPSVFLFPPKPKDTLMISRTPEVTCVVVDVSHEDPEVKFNWYVDGVEVHNAKTKPREEQYNSTYRVVSVLTVLHQDWLNGKEYKCKVSNKALPAPIEKTISKAKGQPREPQVYTLPPSREELTKNQVSLTCLVKGFYPSDIAVEWESNGQPENNYKTTPPVLDSDGSFFLYSKLTVDKSRWQQGNVFSCSVMHEALHNHYTQKSLSLSPGS

SEQ ID NO: 94 - DNA, 1644 bp, synthetic construct
  misc_feature 1..1644: note = LS3487 [NTD_long_a-Rv3C-Fc]
  source 1..1644: mol_type = other DNA
atgggtaccgtgaatcttactacacgtacacagctgccaccagcctataccaacagttttactcgtggtgtatactaccccgataaggtttttcgctcttccgtgctccatagtacacaggatctcttcctgccattcttcagtaatgtcacctggtttcatgctattcatgtgtctggaactaatggaaccaagcgctttgataatccagtactcccttttaatgacggagtttacttcgcaagcacagaaaagtccaatatcatacgcgggtggattttcggaactaccctcgactccaagactcaatcactccttatagtcaataacgccaccaatgtggtcatcaaagtctgtgaatttcaattttgcaacgacccattcctgggcgtctactatcataaaaacaataagagctggatggaatccgaatttagagtatacagttctgctaataattgcacattcgaatatgtatcccaacccttccttatggatttggagggcaagcaaggcaatttcaaaaacttgcgggaatttgtcttcaaaaacatagatgggtacttcaaaatttatagtaagcatacacctattaacttggttcgagacttgcctcagggcttcagcgcccttgaacctcttgtggatttgccaatcggcatcaatataacacgatttcagacactcttggcactgcatcgttcctacctgactccaggagactctagctctggttggacagcaggcgccgctgcttactatgtcggctacttgcaacctcgaacattccttctcaaatataacgaaaatggaactatcacagatgccgtggattgtgccttggaccctctctcagagactaagtgtaccctcaagtctttcactgtggagggatccggcggcggcggtctggaggtgctgttccagggacccggtggtggcggctccggagacaagacccacacctgccccccttgtcctgcccctgagctgctgggcggaccctccgtgtttctgttcccccccaagcccaaggacaccctgatgatcagccggacccccgaggtcacctgcgtggtggtggacgtcagccacgaggacccagaggtcaagttcaattggtatgtggacggcgtggaggtgcacaacgccaagaccaagccccgggaggaacagtacaacagcacctaccgggtggtgtccgtgctgaccgtgctgcaccaggactggctgaacggcaaagaatacaagtgcaaggtgtccaacaaggccctgcctgcccccatcgagaaaaccatcagcaaggccaagggccagcccagagaaccccaggtgtacaccctgccccctagcagggaagagctgaccaagaaccaggtgtccctgacctgtctggtcaagggcttctaccccagcgatatcgccgtggagtgggagagcaacggccagcctgagaacaactacaagaccaccccccctgtgctggacagcgacggcagcttcttcctgtacagcaagctgaccgtggacaagagccggtggcagcagggcaacgtgtttagctgcagcgtgatgcacgaggccctgcacaaccactacacccagaagagcttaagcctgtcccctggcagttgataactcgag

SEQ ID NO: 95 - protein, 537 aa, synthetic construct
  REGION 1..537: note = LS2326 [NTD_long_a-Fc]
MGTVNLTTRTQLPPAYTNSFTRGVYYPDKVFRSSVLHSTQDLFLPFFSNVTWFHAIHVSGTNGTKRFDNPVLPFNDGVYFASTEKSNIIRGWIFGTTLDSKTQSLLIVNNATNVVIKVCEFQFCNDPFLGVYYHKNNKSWMESEFRVYSSANNCTFEYVSQPFLMDLEGKQGNFKNLREFVFKNIDGYFKIYSKHTPINLVRDLPQGFSALEPLVDLPIGINITRFQTLLALHRSYLTPGDSSSGWTAGAAAYYVGYLQPRTFLLKYNENGTITDAVDCALDPLSETKCTLKSFTVEGSGGGGDGGGGSGDKTHTCPPCPAPELLGGPSVFLFPPKPKDTLMISRTPEVTCVVVDVSHEDPEVKFNWYVDGVEVHNAKTKPREEQYNSTYRVVSVLTVLHQDWLNGKEYKCKVSNKALPAPIEKTISKAKGQPREPQVYTLPPSREELTKNQVSLTCLVKGFYPSDIAVEWESNGQPENNYKTTPPVLDSDGSFFLYSKLTVDKSRWQQGNVFSCSVMHEALHNHYTQKSLSLSPGS

SEQ ID NO: 96 - DNA, 1623 bp, synthetic construct
  misc_feature 1..1623: note = LS2326 [NTD_long_a-Fc]
  source 1..1623: mol_type = other DNA
atgggtaccgtgaatcttactacacgtacacagctgccaccagcctataccaacagttttactcgtggtgtatactaccccgataaggtttttcgctcttccgtgctccatagtacacaggatctcttcctgccattcttcagtaatgtcacctggtttcatgctattcatgtgtctggaactaatggaaccaagcgctttgataatccagtactcccttttaatgacggagtttacttcgcaagcacagaaaagtccaatatcatacgcgggtggattttcggaactaccctcgactccaagactcaatcactccttatagtcaataacgccaccaatgtggtcatcaaagtctgtgaatttcaattttgcaacgacccattcctgggcgtctactatcataaaaacaataagagctggatggaatccgaatttagagtatacagttctgctaataattgcacattcgaatatgtatcccaacccttccttatggatttggagggcaagcaaggcaatttcaaaaacttgcgggaatttgtcttcaaaaacatagatgggtacttcaaaatttatagtaagcatacacctattaacttggttcgagacttgcctcagggcttcagcgcccttgaacctcttgtggatttgccaatcggcatcaatataacacgatttcagacactcttggcactgcatcgttcctacctgactccaggagactctagctctggttggacagcaggcgccgctgcttactatgtcggctacttgcaacctcgaacattccttctcaaatataacgaaaatggaactatcacagatgccgtggattgtgccttggaccctctctcagagactaagtgtaccctcaagtctttcactgtggagggatccggcggcggcggtgacggtggtggcggctccggagacaagacccacacctgccccccttgtcctgcccctgagctgctgggcggaccctccgtgtttctgttcccccccaagcccaaggacaccctgatgatcagccggacccccgaggtcacctgcgtggtggtggacgtcagccacgaggacccagaggtcaagttcaattggtatgtggacggcgtggaggtgcacaacgccaagaccaagccccgggaggaacagtacaacagcacctaccgggtggtgtccgtgctgaccgtgctgcaccaggactggctgaacggcaaagaatacaagtgcaaggtgtccaacaaggccctgcctgcccccatcgagaaaaccatcagcaaggccaagggccagcccagagaaccccaggtgtacaccctgccccctagcagggaagagctgaccaagaaccaggtgtccctgacctgtctggtcaagggcttctaccccagcgatatcgccgtggagtgggagagcaacggccagcctgagaacaactacaagaccaccccccctgtgctggacagcgacggcagcttcttcctgtacagcaagctgaccgtggacaagagccggtggcagcagggcaacgtgtttagctgcagcgtgatgcacgaggccctgcacaaccactacacccagaagagcttaagcctgtcccctggcagttgataactcgag

SEQ ID NO: 97 - protein, 577 aa, synthetic construct
  REGION 1..577: note = LS2354 [CTD_long_a_D614G-Fc]
TLKSFTVEKGIYQTSNFRVQPTESIVRFPNITNLCPFGEVFNATRFASVYAWNRKRISNCVADYSVLYNSASFSTFKCYGVSPTKLNDLCFTNVYADSFVIRGDEVRQIAPGQTGKIADYNYKLPDDFTGCVIAWNSNNLDSKVGGNYNYLYRLFRKSNLKPFERDISTEIYQAGSTPCNGVEGFNCYFPLQSYGFQPTNGVGYQPYRVVVLSFELLHAPATVCGPKKSTNLVKNKCVNFNFNGLTGTGVLTESNKKFLPFQQFGRDIADTTDAVRDPQTLEILDITPCSFGGVSVITPGTNTSNQVAVLYQGVNCTEVPVAIHADQLTPTWRVYSTGSGGGGDGGGGSGDKTHTCPPCPAPELLGGPSVFLFPPKPKDTLMISRTPEVTCVVVDVSHEDPEVKFNWYVDGVEVHNAKTKPREEQYNSTYRVVSVLTVLHQDWLNGKEYKCKVSNKALPAPIEKTISKAKGQPREPQVYTLPPSREELTKNQVSLTCLVKGFYPSDIAVEWESNGQPENNYKTTPPVLDSDGSFFLYSKLTVDKSRWQQGNVFSCSVMHEALHNHYTQKSLSLSPGS

SEQ ID NO: 98 - DNA, 1734 bp, synthetic construct
  misc_feature 1..1734: note = LS2354 [CTD_long_a_D614G-Fc]
  source 1..1734: mol_type = other DNA
accctcaagtctttcactgtggagaaagggatctatcaaaccagcaattttagggttcagcccaccgaatcaatagtacggttcccaaatatcactaatctttgccccttcggggaagtatttaacgctactcgatttgctagcgtatatgcctggaaccggaagagaataagcaactgtgttgcagactatagcgtgctttacaattccgcatcctttagtaccttcaaatgttacggtgtgagccccaccaaactcaatgatctctgtttcacaaacgtgtacgcagatagtttcgttatacgcggggacgaagtacggcagatagcccctggccagacaggaaagatagccgattacaactacaaacttccagacgattttacagggtgtgtgatcgcttggaattcaaataacctggactccaaagtgggaggcaactataattacctgtaccgactgttccgcaaaagcaacttgaaacctttcgagcgagatatatcaaccgaaatctaccaagctggttctacaccttgtaatggtgtggagggatttaactgctacttccctcttcagtcctatggatttcagcctacaaatggagtcgggtatcaaccctatagagtcgtggtgttgtcatttgaacttctccatgcacctgctactgtctgtggtccaaaaaagtccactaatcttgtaaaaaacaaatgcgtgaacttcaatttcaatggcctcaccggaacaggtgttttgacagaatctaacaaaaaattccttcccttccagcaattcgggagagatatcgctgacacaaccgacgccgtaagagatccccagactcttgagatccttgacatcaccccatgcagttttggaggcgtgtctgtgatcacccctggcacaaacacctcaaaccaggtggctgtgctgtatcaaggtgtcaattgcaccgaggtgcctgtggcaatacatgctgaccagctcaccccaacctggcgagtgtactctaccggatccggcggcggcggtgacggtggtggcggctccggagacaagacccacacctgccccccttgtcctgcccctgagctgctgggcggaccctccgtgtttctgttcccccccaagcccaaggacaccctgatgatcagccggacccccgaggtcacctgcgtggtggtggacgtcagccacgaggacccagaggtcaagttcaattggtatgtggacggcgtggaggtgcacaacgccaagaccaagccccgggaggaacagtacaacagcacctaccgggtggtgtccgtgctgaccgtgctgcaccaggactggctgaacggcaaagaatacaagtgcaaggtgtccaacaaggccctgcctgcccccatcgagaaaaccatcagcaaggccaagggccagcccagagaaccccaggtgtacaccctgccccctagcagggaagagctgaccaagaaccaggtgtccctgacctgtctggtcaagggcttctaccccagcgatatcgccgtggagtgggagagcaacggccagcctgagaacaactacaagaccaccccccctgtgctggacagcgacggcagcttcttcctgtacagcaagctgaccgtggacaagagccggtggcagcagggcaacgtgtttagctgcagcgtgatgcacgaggccctgcacaaccactacacccagaagagcttaagcctgtcccctggcagttga

SEQ ID NO: 99 - protein, 924 aa, synthetic construct
  REGION 1..924: note = LS2355 [CTD_long_a-dimer-Fc]
TLKSFTVEKGIYQTSNFRVQPTESIVRFPNITNLCPFGEVFNATRFASVYAWNRKRISNCVADYSVLYNSASFSTFKCYGVSPTKLNDLCFTNVYADSFVIRGDEVRQIAPGQTGKIADYNYKLPDDFTGCVIAWNSNNLDSKVGGNYNYLYRLFRKSNLKPFERDISTEIYQAGSTPCNGVEGFNCYFPLQSYGFQPTNGVGYQPYRVVVLSFELLHAPATVCGPKKSTNLVKNKCVNFNFNGLTGTGVLTESNKKFLPFQQFGRDIADTTDAVRDPQTLEILDITPCSFGGVSVITPGTNTSNQVAVLYQDVNCTEVPVAIHADQLTPTWRVYSTGGGGSGGGGSTLKSFTVEKGIYQTSNFRVQPTESIVRFPNITNLCPFGEVFNATRFASVYAWNRKRISNCVADYSVLYNSASFSTFKCYGVSPTKLNDLCFTNVYADSFVIRGDEVRQIAPGQTGKIADYNYKLPDDFTGCVIAWNSNNLDSKVGGNYNYLYRLFRKSNLKPFERDISTEIYQAGSTPCNGVEGFNCYFPLQSYGFQPTNGVGYQPYRVVVLSFELLHAPATVCGPKKSTNLVKNKCVNFNFNGLTGTGVLTESNKKFLPFQQFGRDIADTTDAVRDPQTLEILDITPCSFGGVSVITPGTNTSNQVAVLYQDVNCTEVPVAIHADQLTPTWRVYSTGSGGGGDGGGGSGDKTHTCPPCPAPELLGGPSVFLFPPKPKDTLMISRTPEVTCVVVDVSHEDPEVKFNWYVDGVEVHNAKTKPREEQYNSTYRVVSVLTVLHQDWLNGKEYKCKVSNKALPAPIEKTISKAKGQPREPQVYTLPPSREELTKNQVSLTCLVKGFYPSDIAVEWESNGQPENNYKTTPPVLDSDGSFFLYSKLTVDKSRWQQGNVFSCSVMHEALHNHYTQKSLSLSPGS

SEQ ID NO: 100 - DNA, 2775 bp, synthetic construct
  misc_feature 1..2775: note = LS2355 [CTD_long_a-dimer-Fc]
  source 1..2775: mol_type = other DNA
accctcaagtctttcactgtggagaaagggatctatcaaaccagcaattttagggttcagcccaccgaatcaatagtacggttcccaaatatcactaatctttgccccttcggggaagtatttaacgctactcgatttgctagcgtatatgcctggaaccggaagagaataagcaactgtgttgcagactatagcgtgctttacaattccgcatcctttagtaccttcaaatgttacggtgtgagccccaccaaactcaatgatctctgtttcacaaacgtgtacgcagatagtttcgttatacgcggggacgaagtacggcagatagcccctggccagacaggaaagatagccgattacaactacaaacttccagacgattttacagggtgtgtgatcgcttggaattcaaataacctggactccaaagtgggaggcaactataattacctgtaccgactgttccgcaaaagcaacttgaaacctttcgagcgagatatatcaaccgaaatctaccaagctggttctacaccttgtaatggtgtggagggatttaactgctacttccctcttcagtcctatggatttcagcctacaaatggagtcgggtatcaaccctatagagtcgtggtgttgtcatttgaacttctccatgcacctgctactgtctgtggtccaaaaaagtccactaatcttgtaaaaaacaaatgcgtgaacttcaatttcaatggcctcaccggaacaggtgttttgacagaatctaacaaaaaattccttcccttccagcaattcgggagagatatcgctgacacaaccgacgccgtaagagatccccagactcttgagatccttgacatcaccccatgcagttttggaggcgtgtctgtgatcacccctggcacaaacacctcaaaccaggtggctgtgctgtatcaagatgtcaattgcaccgaggtgcctgtggcaatacatgctgaccagctcaccccaacctggcgagtgtactctaccggtggcggtggctccgggggcggaggttccaccctcaagtctttcactgtggagaaagggatctatcaaaccagcaattttagggttcagcccaccgaatcaatagtacggttcccaaatatcactaatctttgccccttcggggaagtatttaacgctactcgatttgctagcgtatatgcctggaaccggaagagaataagcaactgtgttgcagactatagcgtgctttacaattccgcatcctttagtaccttcaaatgttacggtgtgagccccaccaaactcaatgatctctgtttcacaaacgtgtacgcagatagtttcgttatacgcggggacgaagtacggcagatagcccctggccagacaggaaagatagccgattacaactacaaacttccagacgattttacagggtgtgtgatcgcttggaattcaaataacctggactccaaagtgggaggcaactataattacctgtaccgactgttccgcaaaagcaacttgaaacctttcgagcgagatatatcaaccgaaatctaccaagctggttctacaccttgtaatggtgtggagggatttaactgctacttccctcttcagtcctatggatttcagcctacaaatggagtcgggtatcaaccctatagagtcgtggtgttgtcatttgaacttctccatgcacctgctactgtctgtggtccaaaaaagtccactaatcttgtaaaaaacaaatgcgtgaacttcaatttcaatggcctcaccggaacaggtgttttgacagaatctaacaaaaaattccttcccttccagcaattcgggagagatatcgctgacacaaccgacgccgtaagagatccccagactcttgagatccttgacatcaccccatgcagttttggaggcgtgtctgtgatcacccctggcacaaacacctcaaaccaggtggctgtgctgtatcaagatgtcaattgcaccgaggtgcctgtggcaatacatgctgaccagctcaccccaacctggcgagtgtactctaccggatccggcggcggcggtgacggtggtggcggctccggagacaagacccacacctgccccccttgtcctgcccctgagctgctgggcggaccctccgtgtttctgttcccccccaagcccaaggacaccctgatgatcagccggacccccgaggtcacctgcgtggtggtggacgtcagccacgaggacccagaggtcaagttcaattggtatgtggacggcgtggaggtgcacaacgccaagaccaagccccgggaggaacagtacaacagcacctaccgggtggtgtccgtgctgaccgtgctgcaccaggactggctgaacggcaaagaatacaagtgcaaggtgtccaacaaggccctgcctgcccccatcgagaaaaccatcagcaaggccaagggccagcccagagaaccccaggtgtacaccctgccccctagcagggaagagctgaccaagaaccaggtgtccctgacctgtctggtcaagggcttctaccccagcgatatcgccgtggagtgggagagcaacggccagcctgagaacaactacaagaccaccccccctgtgctggacagcgacggcagcttcttcctgtacagcaagctgaccgtggacaagagccggtggcagcagggcaacgtgtttagctgcagcgtgatgcacgaggccctgcacaaccactacacccagaagagcttaagcctgtcccctggcagttga

SEQ ID NO: 101 - protein, 569 aa, synthetic construct
  REGION 1..569: note = LS2356 [CTD_long_b-Fc]
KGIYQTSNFRVQPTESIVRFPNITNLCPFGEVFNATRFASVYAWNRKRISNCVADYSVLYNSASFSTFKCYGVSPTKLNDLCFTNVYADSFVIRGDEVRQIAPGQTGKIADYNYKLPDDFTGCVIAWNSNNLDSKVGGNYNYLYRLFRKSNLKPFERDISTEIYQAGSTPCNGVEGFNCYFPLQSYGFQPTNGVGYQPYRVVVLSFELLHAPATVCGPKKSTNLVKNKCVNFNFNGLTGTGVLTESNKKFLPFQQFGRDIADTTDAVRDPQTLEILDITPCSFGGVSVITPGTNTSNQVAVLYQDVNCTEVPVAIHADQLTPTWRVYSTGSGGGGDGGGGSGDKTHTCPPCPAPELLGGPSVFLFPPKPKDTLMISRTPEVTCVVVDVSHEDPEVKFNWYVDGVEVHNAKTKPREEQYNSTYRVVSVLTVLHQDWLNGKEYKCKVSNKALPAPIEKTISKAKGQPREPQVYTLPPSREELTKNQVSLTCLVKGFYPSDIAVEWESNGQPENNYKTTPPVLDSDGSFFLYSKLTVDKSRWQQGNVFSCSVMHEALHNHYTQKSLSLSPGS

SEQ ID NO: 102 - DNA, 1710 bp, synthetic construct
  misc_feature 1..1710: note = LS2356 [CTD_long_b-Fc]
  source 1..1710: mol_type = other DNA
aaagggatctatcaaaccagcaattttagggttcagcccaccgaatcaatagtacggttcccaaatatcactaatctttgccccttcggggaagtatttaacgctactcgatttgctagcgtatatgcctggaaccggaagagaataagcaactgtgttgcagactatagcgtgctttacaattccgcatcctttagtaccttcaaatgttacggtgtgagccccaccaaactcaatgatctctgtttcacaaacgtgtacgcagatagtttcgttatacgcggggacgaagtacggcagatagcccctggccagacaggaaagatagccgattacaactacaaacttccagacgattttacagggtgtgtgatcgcttggaattcaaataacctggactccaaagtgggaggcaactataattacctgtaccgactgttccgcaaaagcaacttgaaacctttcgagcgagatatatcaaccgaaatctaccaagctggttctacaccttgtaatggtgtggagggatttaactgctacttccctcttcagtcctatggatttcagcctacaaatggagtcgggtatcaaccctatagagtcgtggtgttgtcatttgaacttctccatgcacctgctactgtctgtggtccaaaaaagtccactaatcttgtaaaaaacaaatgcgtgaacttcaatttcaatggcctcaccggaacaggtgttttgacagaatctaacaaaaaattccttcccttccagcaattcgggagagatatcgctgacacaaccgacgccgtaagagatccccagactcttgagatccttgacatcaccccatgcagttttggaggcgtgtctgtgatcacccctggcacaaacacctcaaaccaggtggctgtgctgtatcaagatgtcaattgcaccgaggtgcctgtggcaatacatgctgaccagctcaccccaacctggcgagtgtactctaccggatccggcggcggcggtgacggtggtggcggctccggagacaagacccacacctgccccccttgtcctgcccctgagctgctgggcggaccctccgtgtttctgttcccccccaagcccaaggacaccctgatgatcagccggacccccgaggtcacctgcgtggtggtggacgtcagccacgaggacccagaggtcaagttcaattggtatgtggacggcgtggaggtgcacaacgccaagaccaagccccgggaggaacagtacaacagcacctaccgggtggtgtccgtgctgaccgtgctgcaccaggactggctgaacggcaaagaatacaagtgcaaggtgtccaacaaggccctgcctgcccccatcgagaaaaccatcagcaaggccaagggccagcccagagaaccccaggtgtacaccctgccccctagcagggaagagctgaccaagaaccaggtgtccctgacctgtctggtcaagggcttctaccccagcgatatcgccgtggagtgggagagcaacggccagcctgagaacaactacaagaccaccccccctgtgctggacagcgacggcagcttcttcctgtacagcaagctgaccgtggacaagagccggtggcagcagggcaacgtgtttagctgcagcgtgatgcacgaggccctgcacaaccactacacccagaagagcttaagcctgtcccctggcagttga

SEQ ID NO: 103 - protein, 565 aa, synthetic construct
  REGION 1..565: note = LS2357 [CTD_long_c-Fc]
KGIYQTSNFRVQPTESIVRFPNITNLCPFGEVFNATRFASVYAWNRKRISNCVADYSVLYNSASFSTFKCYGVSPTKLNDLCFTNVYADSFVIRGDEVRQIAPGQTGKIADYNYKLPDDFTGCVIAWNSNNLDSKVGGNYNYLYRLFRKSNLKPFERDISTEIYQAGSTPCNGVEGFNCYFPLQSYGFQPTNGVGYQPYRVVVLSFELLHAPATVCGPKKSTNLVKNKCVNFNFNGLTGTGVLTESNKKFLPFQQFGRDIADTTDAVRDPQTLEILDITPCSFGGVSVITPGTNTSNQVAVLYQDVNCTEVPVAIHADQLTPTWRGSGGGGDGGGGSGDKTHTCPPCPAPELLGGPSVFLFPPKPKDTLMISRTPEVTCVVVDVSHEDPEVKFNWYVDGVEVHNAKTKPREEQYNSTYRVVSVLTVLHQDWLNGKEYKCKVSNKALPAPIEKTISKAKGQPREPQVYTLPPSREELTKNQVSLTCLVKGFYPSDIAVEWESNGQPENNYKTTPPVLDSDGSFFLYSKLTVDKSRWQQGNVFSCSVMHEALHNHYTQKSLSLSPGS

SEQ ID NO: 104 - DNA, 1698 bp, synthetic construct
  misc_feature 1..1698: note = LS2357 [CTD_long_c-Fc]
  source 1..1698: mol_type = other DNA
aaagggatctatcaaaccagcaattttagggttcagcccaccgaatcaatagtacggttcccaaatatcactaatctttgccccttcggggaagtatttaacgctactcgatttgctagcgtatatgcctggaaccggaagagaataagcaactgtgttgcagactatagcgtgctttacaattccgcatcctttagtaccttcaaatgttacggtgtgagccccaccaaactcaatgatctctgtttcacaaacgtgtacgcagatagtttcgttatacgcggggacgaagtacggcagatagcccctggccagacaggaaagatagccgattacaactacaaacttccagacgattttacagggtgtgtgatcgcttggaattcaaataacctggactccaaagtgggaggcaactataattacctgtaccgactgttccgcaaaagcaacttgaaacctttcgagcgagatatatcaaccgaaatctaccaagctggttctacaccttgtaatggtgtggagggatttaactgctacttccctcttcagtcctatggatttcagcctacaaatggagtcgggtatcaaccctatagagtcgtggtgttgtcatttgaacttctccatgcacctgctactgtctgtggtccaaaaaagtccactaatcttgtaaaaaacaaatgcgtgaacttcaatttcaatggcctcaccggaacaggtgttttgacagaatctaacaaaaaattccttcccttccagcaattcgggagagatatcgctgacacaaccgacgccgtaagagatccccagactcttgagatccttgacatcaccccatgcagttttggaggcgtgtctgtgatcacccctggcacaaacacctcaaaccaggtggctgtgctgtatcaagatgtcaattgcaccgaggtgcctgtggcaatacatgctgaccagctcaccccaacctggcgaggatccggcggcggcggtgacggtggtggcggctccggagacaagacccacacctgccccccttgtcctgcccctgagctgctgggcggaccctccgtgtttctgttcccccccaagcccaaggacaccctgatgatcagccggacccccgaggtcacctgcgtggtggtggacgtcagccacgaggacccagaggtcaagttcaattggtatgtggacggcgtggaggtgcacaacgccaagaccaagccccgggaggaacagtacaacagcacctaccgggtggtgtccgtgctgaccgtgctgcaccaggactggctgaacggcaaagaatacaagtgcaaggtgtccaacaaggccctgcctgcccccatcgagaaaaccatcagcaaggccaagggccagcccagagaaccccaggtgtacaccctgccccctagcagggaagagctgaccaagaaccaggtgtccctgacctgtctggtcaagggcttctaccccagcgatatcgccgtggagtgggagagcaacggccagcctgagaacaactacaagaccaccccccctgtgctggacagcgacggcagcttcttcctgtacagcaagctgaccgtggacaagagccggtggcagcagggcaacgtgtttagctgcagcgtgatgcacgaggccctgcacaaccactacacccagaagagcttaagcctgtcccctggcagttga

SEQ ID NO: 105 - protein, 550 aa, synthetic construct
  REGION 1..550: note = LS2358 [CTD_long_d-Fc]
KGIYQTSNFRVQPTESIVRFPNITNLCPFGEVFNATRFASVYAWNRKRISNCVADYSVLYNSASFSTFKCYGVSPTKLNDLCFTNVYADSFVIRGDEVRQIAPGQTGKIADYNYKLPDDFTGCVIAWNSNNLDSKVGGNYNYLYRLFRKSNLKPFERDISTEIYQAGSTPCNGVEGFNCYFPLQSYGFQPTNGVGYQPYRVVVLSFELLHAPATVCGPKKSTNLVKNKCVNFNFNGLTGTGVLTESNKKFLPFQQFGRDIADTTDAVRDPQTLEILDITPCSFGGVSVITPGTNTSNQVAVLYQDVNCTEGSGGGGDGGGGSGDKTHTCPPCPAPELLGGPSVFLFPPKPKDTLMISRTPEVTCVVVDVSHEDPEVKFNWYVDGVEVHNAKTKPREEQYNSTYRVVSVLTVLHQDWLNGKEYKCKVSNKALPAPIEKTISKAKGQPREPQVYTLPPSREELTKNQVSLTCLVKGFYPSDIAVEWESNGQPENNYKTTPPVLDSDGSFFLYSKLTVDKSRWQQGNVFSCSVMHEALHNHYTQKSLSLSPGS

SEQ ID NO: 106 - DNA, 1653 bp, synthetic construct
  misc_feature 1..1653: note = LS2358 [CTD_long_d-Fc]
  source 1..1653: mol_type = other DNA
aaagggatctatcaaaccagcaattttagggttcagcccaccgaatcaatagtacggttcccaaatatcactaatctttgccccttcggggaagtatttaacgctactcgatttgctagcgtatatgcctggaaccggaagagaataagcaactgtgttgcagactatagcgtgctttacaattccgcatcctttagtaccttcaaatgttacggtgtgagccccaccaaactcaatgatctctgtttcacaaacgtgtacgcagatagtttcgttatacgcggggacgaagtacggcagatagcccctggccagacaggaaagatagccgattacaactacaaacttccagacgattttacagggtgtgtgatcgcttggaattcaaataacctggactccaaagtgggaggcaactataattacctgtaccgactgttccgcaaaagcaacttgaaacctttcgagcgagatatatcaaccgaaatctaccaagctggttctacaccttgtaatggtgtggagggatttaactgctacttccctcttcagtcctatggatttcagcctacaaatggagtcgggtatcaaccctatagagtcgtggtgttgtcatttgaacttctccatgcacctgctactgtctgtggtccaaaaaagtccactaatcttgtaaaaaacaaatgcgtgaacttcaatttcaatggcctcaccggaacaggtgttttgacagaatctaacaaaaaattccttcccttccagcaattcgggagagatatcgctgacacaaccgacgccgtaagagatccccagactcttgagatccttgacatcaccccatgcagttttggaggcgtgtctgtgatcacccctggcacaaacacctcaaaccaggtggctgtgctgtatcaagatgtcaattgcaccgagggatccggcggcggcggtgacggtggtggcggctccggagacaagacccacacctgccccccttgtcctgcccctgagctgctgggcggaccctccgtgtttctgttcccccccaagcccaaggacaccctgatgatcagccggacccccgaggtcacctgcgtggtggtggacgtcagccacgaggacccagaggtcaagttcaattggtatgtggacggcgtggaggtgcacaacgccaagaccaagccccgggaggaacagtacaacagcacctaccgggtggtgtccgtgctgaccgtgctgcaccaggactggctgaacggcaaagaatacaagtgcaaggtgtccaacaaggccctgcctgcccccatcgagaaaaccatcagcaaggccaagggccagcccagagaaccccaggtgtacaccctgccccctagcagggaagagctgaccaagaaccaggtgtccctgacctgtctggtcaagggcttctaccccagcgatatcgccgtggagtgggagagcaacggccagcctgagaacaactacaagaccaccccccctgtgctggacagcgacggcagcttcttcctgtacagcaagctgaccgtggacaagagccggtggcagcagggcaacgtgtttagctgcagcgtgatgcacgaggccctgcacaaccactacacccagaagagcttaagcctgtcccctggcagttga

SEQ ID NO: 107 - protein, 538 aa, synthetic construct
  REGION 1..538: note = LS2359 [CTD_long_e-Fc]
KGIYQTSNFRVQPTESIVRFPNITNLCPFGEVFNATRFASVYAWNRKRISNCVADYSVLYNSASFSTFKCYGVSPTKLNDLCFTNVYADSFVIRGDEVRQIAPGQTGKIADYNYKLPDDFTGCVIAWNSNNLDSKVGGNYNYLYRLFRKSNLKPFERDISTEIYQAGSTPCNGVEGFNCYFPLQSYGFQPTNGVGYQPYRVVVLSFELLHAPATVCGPKKSTNLVKNKCVNFNFNGLTGTGVLTESNKKFLPFQQFGRDIADTTDAVRDPQTLEILDITPCSFGGVSVITPGTNTSNQGSGGGGDGGGGSGDKTHTCPPCPAPELLGGPSVFLFPPKPKDTLMISRTPEVTCVVVDVSHEDPEVKFNWYVDGVEVHNAKTKPREEQYNSTYRVVSVLTVLHQDWLNGKEYKCKVSNKALPAPIEKTISKAKGQPREPQVYTLPPSREELTKNQVSLTCLVKGFYPSDIAVEWESNGQPENNYKTTPPVLDSDGSFFLYSKLTVDKSRWQQGNVFSCSVMHEALHNHYTQKSLSLSPGS

SEQ ID NO: 108 - DNA, 1617 bp, synthetic construct
  misc_feature 1..1617: note = LS2359 [CTD_long_e-Fc]
  source 1..1617: mol_type = other DNA
aaagggatctatcaaaccagcaattttagggttcagcccaccgaatcaatagtacggttcccaaatatcactaatctttgccccttcggggaagtatttaacgctactcgatttgctagcgtatatgcctggaaccggaagagaataagcaactgtgttgcagactatagcgtgctttacaattccgcatcctttagtaccttcaaatgttacggtgtgagccccaccaaactcaatgatctctgtttcacaaacgtgtacgcagatagtttcgttatacgcggggacgaagtacggcagatagcccctggccagacaggaaagatagccgattacaactacaaacttccagacgattttacagggtgtgtgatcgcttggaattcaaataacctggactccaaagtgggaggcaactataattacctgtaccgactgttccgcaaaagcaacttgaaacctttcgagcgagatatatcaaccgaaatctaccaagctggttctacaccttgtaatggtgtggagggatttaactgctacttccctcttcagtcctatggatttcagcctacaaatggagtcgggtatcaaccctatagagtcgtggtgttgtcatttgaacttctccatgcacctgctactgtctgtggtccaaaaaagtccactaatcttgtaaaaaacaaatgcgtgaacttcaatttcaatggcctcaccggaacaggtgttttgacagaatctaacaaaaaattccttcccttccagcaattcgggagagatatcgctgacacaaccgacgccgtaagagatccccagactcttgagatccttgacatcaccccatgcagttttggaggcgtgtctgtgatcacccctggcacaaacacctcaaaccagggatccggcggcggcggtgacggtggtggcggctccggagacaagacccacacctgccccccttgtcctgcccctgagctgctgggcggaccctccgtgtttctgttcccccccaagcccaaggacaccctgatgatcagccggacccccgaggtcacctgcgtggtggtggacgtcagccacgaggacccagaggtcaagttcaattggtatgtggacggcgtggaggtgcacaacgccaagaccaagccccgggaggaacagtacaacagcacctaccgggtggtgtccgtgctgaccgtgctgcaccaggactggctgaacggcaaagaatacaagtgcaaggtgtccaacaaggccctgcctgcccccatcgagaaaaccatcagcaaggccaagggccagcccagagaaccccaggtgtacaccctgccccctagcagggaagagctgaccaagaaccaggtgtccctgacctgtctggtcaagggcttctaccccagcgatatcgccgtggagtgggagagcaacggccagcctgagaacaactacaagaccaccccccctgtgctggacagcgacggcagcttcttcctgtacagcaagctgaccgtggacaagagccggtggcagcagggcaacgtgtttagctgcagcgtgatgcacgaggccctgcacaaccactacacccagaagagcttaagcctgtcccctggcagttga

SEQ ID NO: 109 - protein, 533 aa, synthetic construct
  REGION 1..533: note = LS2360 [CTD_long_f-Fc]
KGIYQTSNFRVQPTESIVRFPNITNLCPFGEVFNATRFASVYAWNRKRISNCVADYSVLYNSASFSTFKCYGVSPTKLNDLCFTNVYADSFVIRGDEVRQIAPGQTGKIADYNYKLPDDFTGCVIAWNSNNLDSKVGGNYNYLYRLFRKSNLKPFERDISTEIYQAGSTPCNGVEGFNCYFPLQSYGFQPTNGVGYQPYRVVVLSFELLHAPATVCGPKKSTNLVKNKCVNFNFNGLTGTGVLTESNKKFLPFQQFGRDIADTTDAVRDPQTLEILDITPCSFGGVSVITPGTGSGGGGDGGGGSGDKTHTCPPCPAPELLGGPSVFLFPPKPKDTLMISRTPEVTCVVVDVSHEDPEVKFNWYVDGVEVHNAKTKPREEQYNSTYRVVSVLTVLHQDWLNGKEYKCKVSNKALPAPIEKTISKAKGQPREPQVYTLPPSREELTKNQVSLTCLVKGFYPSDIAVEWESNGQPENNYKTTPPVLDSDGSFFLYSKLTVDKSRWQQGNVFSCSVMHEALHNHYTQKSLSLSPGS

SEQ ID NO: 110 - DNA, 1602 bp, synthetic construct
  misc_feature 1..1602: note = LS2360 [CTD_long_f-Fc]
  source 1..1602: mol_type = other DNA
aaagggatctatcaaaccagcaattttagggttcagcccaccgaatcaatagtacggttcccaaatatcactaatctttgccccttcggggaagtatttaacgctactcgatttgctagcgtatatgcctggaaccggaagagaataagcaactgtgttgcagactatagcgtgctttacaattccgcatcctttagtaccttcaaatgttacggtgtgagccccaccaaactcaatgatctctgtttcacaaacgtgtacgcagatagtttcgttatacgcggggacgaagtacggcagatagcccctggccagacaggaaagatagccgattacaactacaaacttccagacgattttacagggtgtgtgatcgcttggaattcaaataacctggactccaaagtgggaggcaactataattacctgtaccgactgttccgcaaaagcaacttgaaacctttcgagcgagatatatcaaccgaaatctaccaagctggttctacaccttgtaatggtgtggagggatttaactgctacttccctcttcagtcctatggatttcagcctacaaatggagtcgggtatcaaccctatagagtcgtggtgttgtcatttgaacttctccatgcacctgctactgtctgtggtccaaaaaagtccactaatcttgtaaaaaacaaatgcgtgaacttcaatttcaatggcctcaccggaacaggtgttttgacagaatctaacaaaaaattccttcccttccagcaattcgggagagatatcgctgacacaaccgacgccgtaagagatccccagactcttgagatccttgacatcaccccatgcagttttggaggcgtgtctgtgatcacccctggcacaggatccggcggcggcggtgacggtggtggcggctccggagacaagacccacacctgccccccttgtcctgcccctgagctgctgggcggaccctccgtgtttctgttcccccccaagcccaaggacaccctgatgatcagccggacccccgaggtcacctgcgtggtggtggacgtcagccacgaggacccagaggtcaagttcaattggtatgtggacggcgtggaggtgcacaacgccaagaccaagccccgggaggaacagtacaacagcacctaccgggtggtgtccgtgctgaccgtgctgcaccaggactggctgaacggcaaagaatacaagtgcaaggtgtccaacaaggccctgcctgcccccatcgagaaaaccatcagcaaggccaagggccagcccagagaaccccaggtgtacaccctgccccctagcagggaagagctgaccaagaaccaggtgtccctgacctgtctggtcaagggcttctaccccagcgatatcgccgtggagtgggagagcaacggccagcctgagaacaactacaagaccaccccccctgtgctggacagcgacggcagcttcttcctgtacagcaagctgaccgtggacaagagccggtggcagcagggcaacgtgtttagctgcagcgtgatgcacgaggccctgcacaaccactacacccagaagagcttaagcctgtcccctggcagttga

SEQ ID NO: 111 - protein, 555 aa, synthetic construct
  REGION 1..555: note = LS2361 [CTD_long_g-Fc]
SFTVEKGIYQTSNFRVQPTESIVRFPNITNLCPFGEVFNATRFASVYAWNRKRISNCVADYSVLYNSASFSTFKCYGVSPTKLNDLCFTNVYADSFVIRGDEVRQIAPGQTGKIADYNYKLPDDFTGCVIAWNSNNLDSKVGGNYNYLYRLFRKSNLKPFERDISTEIYQAGSTPCNGVEGFNCYFPLQSYGFQPTNGVGYQPYRVVVLSFELLHAPATVCGPKKSTNLVKNKCVNFNFNGLTGTGVLTESNKKFLPFQQFGRDIADTTDAVRDPQTLEILDITPCSFGGVSVITPGTNTSNQVAVLYQDVNCTEGSGGGGDGGGGSGDKTHTCPPCPAPELLGGPSVFLFPPKPKDTLMISRTPEVTCVVVDVSHEDPEVKFNWYVDGVEVHNAKTKPREEQYNSTYRVVSVLTVLHQDWLNGKEYKCKVSNKALPAPIEKTISKAKGQPREPQVYTLPPSREELTKNQVSLTCLVKGFYPSDIAVEWESNGQPENNYKTTPPVLDSDGSFFLYSKLTVDKSRWQQGNVFSCSVMHEALHNHYTQKSLSLSPGS

SEQ ID NO: 112 - DNA, 1668 bp, synthetic construct
  misc_feature 1..1668: note = LS2361 [CTD_long_g-Fc]
  source 1..1668: mol_type = other DNA
tctttcactgtggagaaagggatctatcaaaccagcaattttagggttcagcccaccgaatcaatagtacggttcccaaatatcactaatctttgccccttcggggaagtatttaacgctactcgatttgctagcgtatatgcctggaaccggaagagaataagcaactgtgttgcagactatagcgtgctttacaattccgcatcctttagtaccttcaaatgttacggtgtgagccccaccaaactcaatgatctctgtttcacaaacgtgtacgcagatagtttcgttatacgcggggacgaagtacggcagatagcccctggccagacaggaaagatagccgattacaactacaaacttccagacgattttacagggtgtgtgatcgcttggaattcaaataacctggactccaaagtgggaggcaactataattacctgtaccgactgttccgcaaaagcaacttgaaacctttcgagcgagatatatcaaccgaaatctaccaagctggttctacaccttgtaatggtgtggagggatttaactgctacttccctcttcagtcctatggatttcagcctacaaatggagtcgggtatcaaccctatagagtcgtggtgttgtcatttgaacttctccatgcacctgctactgtctgtggtccaaaaaagtccactaatcttgtaaaaaacaaatgcgtgaacttcaatttcaatggcctcaccggaacaggtgttttgacagaatctaacaaaaaattccttcccttccagcaattcgggagagatatcgctgacacaaccgacgccgtaagagatccccagactcttgagatccttgacatcaccccatgcagttttggaggcgtgtctgtgatcacccctggcacaaacacctcaaaccaggtggctgtgctgtatcaagatgtcaattgcaccgagggatccggcggcggcggtgacggtggtggcggctccggagacaagacccacacctgccccccttgtcctgcccctgagctgctgggcggaccctccgtgtttctgttcccccccaagcccaaggacaccctgatgatcagccggacccccgaggtcacctgcgtggtggtggacgtcagccacgaggacccagaggtcaagttcaattggtatgtggacggcgtggaggtgcacaacgccaagaccaagccccgggaggaacagtacaacagcacctaccgggtggtgtccgtgctgaccgtgctgcaccaggactggctgaacggcaaagaatacaagtgcaaggtgtccaacaaggccctgcctgcccccatcgagaaaaccatcagcaaggccaagggccagcccagagaaccccaggtgtacaccctgccccctagcagggaagagctgaccaagaaccaggtgtccctgacctgtctggtcaagggcttctaccccagcgatatcgccgtggagtgggagagcaacggccagcctgagaacaactacaagaccaccccccctgtgctggacagcgacggcagcttcttcctgtacagcaagctgaccgtggacaagagccggtggcagcagggcaacgtgtttagctgcagcgtgatgcacgaggccctgcacaaccactacacccagaagagcttaagcctgtcccctggcagttga

SEQ ID NO: 113 - protein, 543 aa, synthetic construct
  REGION 1..543: note = LS2362 [CTD_long_h-Fc]
SFTVEKGIYQTSNFRVQPTESIVRFPNITNLCPFGEVFNATRFASVYAWNRKRISNCVADYSVLYNSASFSTFKCYGVSPTKLNDLCFTNVYADSFVIRGDEVRQIAPGQTGKIADYNYKLPDDFTGCVIAWNSNNLDSKVGGNYNYLYRLFRKSNLKPFERDISTEIYQAGSTPCNGVEGFNCYFPLQSYGFQPTNGVGYQPYRVVVLSFELLHAPATVCGPKKSTNLVKNKCVNFNFNGLTGTGVLTESNKKFLPFQQFGRDIADTTDAVRDPQTLEILDITPCSFGGVSVITPGTNTSNQGSGGGGDGGGGSGDKTHTCPPCPAPELLGGPSVFLFPPKPKDTLMISRTPEVTCVVVDVSHEDPEVKFNWYVDGVEVHNAKTKPREEQYNSTYRVVSVLTVLHQDWLNGKEYKCKVSNKALPAPIEKTISKAKGQPREPQVYTLPPSREELTKNQVSLTCLVKGFYPSDIAVEWESNGQPENNYKTTPPVLDSDGSFFLYSKLTVDKSRWQQGNVFSCSVMHEALHNHYTQKSLSLSPGS

SEQ ID NO: 114 - DNA, 1632 bp, synthetic construct
  misc_feature 1..1632: note = LS2362 [CTD_long_h-Fc]
  source 1..1632: mol_type = other DNA
tctttcactgtggagaaagggatctatcaaaccagcaattttagggttcagcccaccgaatcaatagtacggttcccaaatatcactaatctttgccccttcggggaagtatttaacgctactcgatttgctagcgtatatgcctggaaccggaagagaataagcaactgtgttgcagactatagcgtgctttacaattccgcatcctttagtaccttcaaatgttacggtgtgagccccaccaaactcaatgatctctgtttcacaaacgtgtacgcagatagtttcgttatacgcggggacgaagtacggcagatagcccctggccagacaggaaagatagccgattacaactacaaacttccagacgattttacagggtgtgtgatcgcttggaattcaaataacctggactccaaagtgggaggcaactataattacctgtaccgactgttccgcaaaagcaacttgaaacctttcgagcgagatatatcaaccgaaatctaccaagctggttctacaccttgtaatggtgtggagggatttaactgctacttccctcttcagtcctatggatttcagcctacaaatggagtcgggtatcaaccctatagagtcgtggtgttgtcatttgaacttctccatgcacctgctactgtctgtggtccaaaaaagtccactaatcttgtaaaaaacaaatgcgtgaacttcaatttcaatggcctcaccggaacaggtgttttgacagaatctaacaaaaaattccttcccttccagcaattcgggagagatatcgctgacacaaccgacgccgtaagagatccccagactcttgagatccttgacatcaccccatgcagttttggaggcgtgtctgtgatcacccctggcacaaacacctcaaaccagggatccggcggcggcggtgacggtggtggcggctccggagacaagacccacacctgccccccttgtcctgcccctgagctgctgggcggaccctccgtgtttctgttcccccccaagcccaaggacaccctgatgatcagccggacccccgaggtcacctgcgtggtggtggacgtcagccacgaggacccagaggtcaagttcaattggtatgtggacggcgtggaggtgcacaacgccaagaccaagccccgggaggaacagtacaacagcacctaccgggtggtgtccgtgctgaccgtgctgcaccaggactggctgaacggcaaagaatacaagtgcaaggtgtccaacaaggccctgcctgcccccatcgagaaaaccatcagcaaggccaagggccagcccagagaaccccaggtgtacaccctgccccctagcagggaagagctgaccaagaaccaggtgtccctgacctgtctggtcaagggcttctaccccagcgatatcgccgtggagtgggagagcaacggccagcctgagaacaactacaagaccaccccccctgtgctggacagcgacggcagcttcttcctgtacagcaagctgaccgtggacaagagccggtggcagcagggcaacgtgtttagctgcagcgtgatgcacgaggccctgcacaaccactacacccagaagagcttaagcctgtcccctggcagttga

SEQ ID NO: 115 - protein, 538 aa, synthetic construct
  REGION 1..538: note = LS2363 [CTD_long_i-Fc]
SFTVEKGIYQTSNFRVQPTESIVRFPNITNLCPFGEVFNATRFASVYAWNRKRISNCVADYSVLYNSASFSTFKCYGVSPTKLNDLCFTNVYADSFVIRGDEVRQIAPGQTGKIADYNYKLPDDFTGCVIAWNSNNLDSKVGGNYNYLYRLFRKSNLKPFERDISTEIYQAGSTPCNGVEGFNCYFPLQSYGFQPTNGVGYQPYRVVVLSFELLHAPATVCGPKKSTNLVKNKCVNFNFNGLTGTGVLTESNKKFLPFQQFGRDIADTTDAVRDPQTLEILDITPCSFGGVSVITPGTGSGGGGDGGGGSGDKTHTCPPCPAPELLGGPSVFLFPPKPKDTLMISRTPEVTCVVVDVSHEDPEVKFNWYVDGVEVHNAKTKPREEQYNSTYRVVSVLTVLHQDWLNGKEYKCKVSNKALPAPIEKTISKAKGQPREPQVYTLPPSREELTKNQVSLTCLVKGFYPSDIAVEWESNGQPENNYKTTPPVLDSDGSFFLYSKLTVDKSRWQQGNVFSCSVMHEALHNHYTQKSLSLSPGS

SEQ ID NO: 116 - DNA, 1617 bp, synthetic construct
  misc_feature 1..1617: note = LS2363 [CTD_long_i-Fc]
  source 1..1617: mol_type = other DNA
tctttcactgtggagaaagggatctatcaaaccagcaattttagggttcagcccaccgaatcaatagtacggttcccaaatatcactaatctttgccccttcggggaagtatttaacgctactcgatttgctagcgtatatgcctggaaccggaagagaataagcaactgtgttgcagactatagcgtgctttacaattccgcatcctttagtaccttcaaatgttacggtgtgagccccaccaaactcaatgatctctgtttcacaaacgtgtacgcagatagtttcgttatacgcggggacgaagtacggcagatagcccctggccagacaggaaagatagccgattacaactacaaacttccagacgattttacagggtgtgtgatcgcttggaattcaaataacctggactccaaagtgggaggcaactataattacctgtaccgactgttccgcaaaagcaacttgaaacctttcgagcgagatatatcaaccgaaatctaccaagctggttctacaccttgtaatggtgtggagggatttaactgctacttccctcttcagtcctatggatttcagcctacaaatggagtcgggtatcaaccctatagagtcgtggtgttgtcatttgaacttctccatgcacctgctactgtctgtggtccaaaaaagtccactaatcttgtaaaaaacaaatgcgtgaacttcaatttcaatggcctcaccggaacaggtgttttgacagaatctaacaaaaaattccttcccttccagcaattcgggagagatatcgctgacacaaccgacgccgtaagagatccccagactcttgagatccttgacatcaccccatgcagttttggaggcgtgtctgtgatcacccctggcacaggatccggcggcggcggtgacggtggtggcggctccggagacaagacccacacctgccccccttgtcctgcccctgagctgctgggcggaccctccgtgtttctgttcccccccaagcccaaggacaccctgatgatcagccggacccccgaggtcacctgcgtggtggtggacgtcagccacgaggacccagaggtcaagttcaattggtatgtggacggcgtggaggtgcacaacgccaagaccaagccccgggaggaacagtacaacagcacctaccgggtggtgtccgtgctgaccgtgctgcaccaggactggctgaacggcaaagaatacaagtgcaaggtgtccaacaaggccctgcctgcccccatcgagaaaaccatcagcaaggccaagggccagcccagagaaccccaggtgtacaccctgccccctagcagggaagagctgaccaagaaccaggtgtccctgacctgtctggtcaagggcttctaccccagcgatatcgccgtggagtgggagagcaacggccagcctgagaacaactacaagaccaccccccctgtgctggacagcgacggcagcttcttcctgtacagcaagctgaccgtggacaagagccggtggcagcagggcaacgtgtttagctgcagcgtgatgcacgaggccctgcacaaccactacacccagaagagcttaagcctgtcccctggcagttga

SEQ ID NO: 117 - protein, 501 aa, synthetic construct
  REGION 1..501: note = LS2364 [CTD_short_b-Fc]
NITNLCPFGEVFNATRFASVYAWNRKRISNCVADYSVLYNSASFSTFKCYGVSPTKLNDLCFTNVYADSFVIRGDEVRQIAPGQTGKIADYNYKLPDDFTGCVIAWNSNNLDSKVGGNYNYLYRLFRKSNLKPFERDISTEIYQAGSTPCNGVEGFNCYFPLQSYGFQPTNGVGYQPYRVVVLSFELLHAPATVCGPKKSTNLVKNKCVNFNFNGLTGTGVLTESNKKFLPFQQFGRDIADTTDAVRDPQTLEILDITPCSGSGGGGDGGGGSGDKTHTCPPCPAPELLGGPSVFLFPPKPKDTLMISRTPEVTCVVVDVSHEDPEVKFNWYVDGVEVHNAKTKPREEQYNSTYRVVSVLTVLHQDWLNGKEYKCKVSNKALPAPIEKTISKAKGQPREPQVYTLPPSREELTKNQVSLTCLVKGFYPSDIAVEWESNGQPENNYKTTPPVLDSDGSFFLYSKLTVDKSRWQQGNVFSCSVMHEALHNHYTQKSLSLSPGS

SEQ ID NO: 118 - DNA, 1506 bp, synthetic construct
  misc_feature 1..1506: note = LS2364 [CTD_short_b-Fc]
  source 1..1506: mol_type = other DNA
aatatcactaatctttgccccttcggggaagtatttaacgctactcgatttgctagcgtatatgcctggaaccggaagagaataagcaactgtgttgcagactatagcgtgctttacaattccgcatcctttagtaccttcaaatgttacggtgtgagccccaccaaactcaatgatctctgtttcacaaacgtgtacgcagatagtttcgttatacgcggggacgaagtacggcagatagcccctggccagacaggaaagatagccgattacaactacaaacttccagacgattttacagggtgtgtgatcgcttggaattcaaataacctggactccaaagtgggaggcaactataattacctgtaccgactgttccgcaaaagcaacttgaaacctttcgagcgagatatatcaaccgaaatctaccaagctggttctacaccttgtaatggtgtggagggatttaactgctacttccctcttcagtcctatggatttcagcctacaaatggagtcgggtatcaaccctatagagtcgtggtgttgtcatttgaacttctccatgcacctgctactgtctgtggtccaaaaaagtccactaatcttgtaaaaaacaaatgcgtgaacttcaatttcaatggcctcaccggaacaggtgttttgacagaatctaacaaaaaattccttcccttccagcaattcgggagagatatcgctgacacaaccgacgccgtaagagatccccagactcttgagatccttgacatcaccccatgcagtggatccggcggcggcggtgacggtggtggcggctccggagacaagacccacacctgccccccttgtcctgcccctgagctgctgggcggaccctccgtgtttctgttcccccccaagcccaaggacaccctgatgatcagccggacccccgaggtcacctgcgtggtggtggacgtcagccacgaggacccagaggtcaagttcaattggtatgtggacggcgtggaggtgcacaacgccaagaccaagccccgggaggaacagtacaacagcacctaccgggtggtgtccgtgctgaccgtgctgcaccaggactggctgaacggcaaagaatacaagtgcaaggtgtccaacaaggccctgcctgcccccatcgagaaaaccatcagcaaggccaagggccagcccagagaaccccaggtgtacaccctgccccctagcagggaagagctgaccaagaaccaggtgtccctgacctgtctggtcaagggcttctaccccagcgatatcgccgtggagtgggagagcaacggccagcctgagaacaactacaagaccaccccccctgtgctggacagcgacggcagcttcttcctgtacagcaagctgaccgtggacaagagccggtggcagcagggcaacgtgtttagctgcagcgtgatgcacgaggccctgcacaaccactacacccagaagagcttaagcctgtcccctggcagttga

SEQ ID NO: 119 - protein, 488 aa, synthetic construct
  REGION 1..488: note = LS2365 [CTD_short_c-Fc]
NITNLCPFGEVFNATRFASVYAWNRKRISNCVADYSVLYNSASFSTFKCYGVSPTKLNDLCFTNVYADSFVIRGDEVRQIAPGQTGKIADYNYKLPDDFTGCVIAWNSNNLDSKVGGNYNYLYRLFRKSNLKPFERDISTEIYQAGSTPCNGVEGFNCYFPLQSYGFQPTNGVGYQPYRVVVLSFELLHAPATVCGPKKSTNLVKNKCVNFNFNGLTGTGVLTESNKKFLPFQQFGRDIADTTDAVRDGSGGGGDGGGGSGDKTHTCPPCPAPELLGGPSVFLFPPKPKDTLMISRTPEVTCVVVDVSHEDPEVKFNWYVDGVEVHNAKTKPREEQYNSTYRVVSVLTVLHQDWLNGKEYKCKVSNKALPAPIEKTISKAKGQPREPQVYTLPPSREELTKNQVSLTCLVKGFYPSDIAVEWESNGQPENNYKTTPPVLDSDGSFFLYSKLTVDKSRWQQGNVFSCSVMHEALHNHYTQKSLSLSPGS

SEQ ID NO: 120 - DNA, 1467 bp, synthetic construct
  misc_feature 1..1467: note = LS2365 [CTD_short_c-Fc]
  source 1..1467: mol_type = other DNA
aatatcactaatctttgccccttcggggaagtatttaacgctactcgatttgctagcgtatatgcctggaaccggaagagaataagcaactgtgttgcagactatagcgtgctttacaattccgcatcctttagtaccttcaaatgttacggtgtgagccccaccaaactcaatgatctctgtttcacaaacgtgtacgcagatagtttcgttatacgcggggacgaagtacggcagatagcccctggccagacaggaaagatagccgattacaactacaaacttccagacgattttacagggtgtgtgatcgcttggaattcaaataacctggactccaaagtgggaggcaactataattacctgtaccgactgttccgcaaaagcaacttgaaacctttcgagcgagatatatcaaccgaaatctaccaagctggttctacaccttgtaatggtgtggagggatttaactgctacttccctcttcagtcctatggatttcagcctacaaatggagtcgggtatcaaccctatagagtcgtggtgttgtcatttgaacttctccatgcacctgctactgtctgtggtccaaaaaagtccactaatcttgtaaaaaacaaatgcgtgaacttcaatttcaatggcctcaccggaacaggtgttttgacagaatctaacaaaaaattccttcccttccagcaattcgggagagatatcgctgacacaaccgacgccgtaagagatggatccggcggcggcggtgacggtggtggcggctccggagacaagacccacacctgccccccttgtcctgcccctgagctgctgggcggaccctccgtgtttctgttcccccccaagcccaaggacaccctgatgatcagccggacccccgaggtcacctgcgtggtggtggacgtcagccacgaggacccagaggtcaagttcaattggtatgtggacggcgtggaggtgcacaacgccaagaccaagccccgggaggaacagtacaacagcacctaccgggtggtgtccgtgctgaccgtgctgcaccaggactggctgaacggcaaagaatacaagtgcaaggtgtccaacaaggccctgcctgcccccatcgagaaaaccatcagcaaggccaagggccagcccagagaaccccaggtgtacaccctgccccctagcagggaagagctgaccaagaaccaggtgtccctgacctgtctggtcaagggcttctaccccagcgatatcgccgtggagtgggagagcaacggccagcctgagaacaactacaagaccaccccccctgtgctggacagcgacggcagcttcttcctgtacagcaagctgaccgtggacaagagccggtggcagcagggcaacgtgtttagctgcagcgtgatgcacgaggccctgcacaaccactacacccagaagagcttaagcctgtcccctggcagttga

SEQ ID NO: 121 - protein, 478 aa, synthetic construct
  REGION 1..478: note = LS2366 [CTD_short_d-Fc]
NITNLCPFGEVFNATRFASVYAWNRKRISNCVADYSVLYNSASFSTFKCYGVSPTKLNDLCFTNVYADSFVIRGDEVRQIAPGQTGKIADYNYKLPDDFTGCVIAWNSNNLDSKVGGNYNYLYRLFRKSNLKPFERDISTEIYQAGSTPCNGVEGFNCYFPLQSYGFQPTNGVGYQPYRVVVLSFELLHAPATVCGPKKSTNLVKNKCVNFNFNGLTGTGVLTESNKKFLPFQQFGRDGSGGGGDGGGGSGDKTHTCPPCPAPELLGGPSVFLFPPKPKDTLMISRTPEVTCVVVDVSHEDPEVKFNWYVDGVEVHNAKTKPREEQYNSTYRVVSVLTVLHQDWLNGKEYKCKVSNKALPAPIEKTISKAKGQPREPQVYTLPPSREELTKNQVSLTCLVKGFYPSDIAVEWESNGQPENNYKTTPPVLDSDGSFFLYSKLTVDKSRWQQGNVFSCSVMHEALHNHYTQKSLSLSPGS

SEQ ID NO: 122 - DNA, 1437 bp, synthetic construct
  misc_feature 1..1437: note = LS2366 [CTD_short_d-Fc]
  source 1..1437: mol_type = other DNA
aatatcactaatctttgccccttcggggaagtatttaacgctactcgatttgctagcgtatatgcctggaaccggaagagaataagcaactgtgttgcagactatagcgtgctttacaattccgcatcctttagtaccttcaaatgttacggtgtgagccccaccaaactcaatgatctctgtttcacaaacgtgtacgcagatagtttcgttatacgcggggacgaagtacggcagatagcccctggccagacaggaaagatagccgattacaactacaaacttccagacgattttacagggtgtgtgatcgcttggaattcaaataacctggactccaaagtgggaggcaactataattacctgtaccgactgttccgcaaaagcaacttgaaacctttcgagcgagatatatcaaccgaaatctaccaagctggttctacaccttgtaatggtgtggagggatttaactgctacttccctcttcagtcctatggatttcagcctacaaatggagtcgggtatcaaccctatagagtcgtggtgttgtcatttgaacttctccatgcacctgctactgtctgtggtccaaaaaagtccactaatcttgtaaaaaacaaatgcgtgaacttcaatttcaatggcctcaccggaacaggtgttttgacagaatctaacaaaaaattccttcccttccagcaattcgggagagatggatccggcggcggcggtgacggtggtggcggctccggagacaagacccacacctgccccccttgtcctgcccctgagctgctgggcggaccctccgtgtttctgttcccccccaagcccaaggacaccctgatgatcagccggacccccgaggtcacctgcgtggtggtggacgtcagccacgaggacccagaggtcaagttcaattggtatgtggacggcgtggaggtgcacaacgccaagaccaagccccgggaggaacagtacaacagcacctaccgggtggtgtccgtgctgaccgtgctgcaccaggactggctgaacggcaaagaatacaagtgcaaggtgtccaacaaggccctgcctgcccccatcgagaaaaccatcagcaaggccaagggccagcccagagaaccccaggtgtacaccctgccccctagcagggaagagctgaccaagaaccaggtgtccctgacctgtctggtcaagggcttctaccccagcgatatcgccgtggagtgggagagcaacggccagcctgagaacaactacaagaccaccccccctgtgctggacagcgacggcagcttcttcctgtacagcaagctgaccgtggacaagagccggtggcagcagggcaacgtgtttagctgcagcgtgatgcacgaggccctgcacaaccactacacccagaagagcttaagcctgtcccctggcagttga

SEQ ID NO: 123 - protein, 465 aa, synthetic construct
  REGION 1..465: note = LS2367 [CTD_short_e-Fc]
NITNLCPFGEVFNATRFASVYAWNRKRISNCVADYSVLYNSASFSTFKCYGVSPTKLNDLCFTNVYADSFVIRGDEVRQIAPGQTGKIADYNYKLPDDFTGCVIAWNSNNLDSKVGGNYNYLYRLFRKSNLKPFERDISTEIYQAGSTPCNGVEGFNCYFPLQSYGFQPTNGVGYQPYRVVVLSFELLHAPATVCGPKKSTNLVKNKCVNFNFNGLTGTGVLTESGSGGGGDGGGGSGDKTHTCPPCPAPELLGGPSVFLFPPKPKDTLMISRTPEVTCVVVDVSHEDPEVKFNWYVDGVEVHNAKTKPREEQYNSTYRVVSVLTVLHQDWLNGKEYKCKVSNKALPAPIEKTISKAKGQPREPQVYTLPPSREELTKNQVSLTCLVKGFYPSDIAVEWESNGQPENNYKTTPPVLDSDGSFFLYSKLTVDKSRWQQGNVFSCSVMHEALHNHYTQKSLSLSPGS

SEQ ID NO: 124 - DNA, 1398 bp, synthetic construct
  misc_feature 1..1398: note = LS2367 [CTD_short_e-Fc]
  source 1..1398: mol_type = other DNA
aatatcactaatctttgccccttcggggaagtatttaacgctactcgatttgctagcgtatatgcctggaaccggaagagaataagcaactgtgttgcagactatagcgtgctttacaattccgcatcctttagtaccttcaaatgttacggtgtgagccccaccaaactcaatgatctctgtttcacaaacgtgtacgcagatagtttcgttatacgcggggacgaagtacggcagatagcccctggccagacaggaaagatagccgattacaactacaaacttccagacgattttacagggtgtgtgatcgcttggaattcaaataacctggactccaaagtgggaggcaactataattacctgtaccgactgttccgcaaaagcaacttgaaacctttcgagcgagatatatcaaccgaaatctaccaagctggttctacaccttgtaatggtgtggagggatttaactgctacttccctcttcagtcctatggatttcagcctacaaatggagtcgggtatcaaccctatagagtcgtggtgttgtcatttgaacttctccatgcacctgctactgtctgtggtccaaaaaagtccactaatcttgtaaaaaacaaatgcgtgaacttcaatttcaatggcctcaccggaacaggtgttttgacagaatctggatccggcggcggcggtgacggtggtggcggctccggagacaagacccacacctgccccccttgtcctgcccctgagctgctgggcggaccctccgtgtttctgttcccccccaagcccaaggacaccctgatgatcagccggacccccgaggtcacctgcgtggtggtggacgtcagccacgaggacccagaggtcaagttcaattggtatgtggacggcgtggaggtgcacaacgccaagaccaagccccgggaggaacagtacaacagcacctaccgggtggtgtccgtgctgaccgtgctgcaccaggactggctgaacggcaaagaatacaagtgcaaggtgtccaacaaggccctgcctgcccccatcgagaaaaccatcagcaaggccaagggccagcccagagaaccccaggtgtacaccctgccccctagcagggaagagctgaccaagaaccaggtgtccctgacctgtctggtcaagggcttctaccccagcgatatcgccgtggagtgggagagcaacggccagcctgagaacaactacaagaccaccccccctgtgctggacagcgacggcagcttcttcctgtacagcaagctgaccgtggacaagagccggtggcagcagggcaacgtgtttagctgcagcgtgatgcacgaggccctgcacaaccactacacccagaagagcttaagcctgtcccctggcagttga

SEQ ID NO: 125 - protein, 500 aa, synthetic construct
  REGION 1..500: note = LS2368 [CTD_short_f-Fc]
RVQPTESIVRFPNITNLCPFGEVFNATRFASVYAWNRKRISNCVADYSVLYNSASFSTFKCYGVSPTKLNDLCFTNVYADSFVIRGDEVRQIAPGQTGKIADYNYKLPDDFTGCVIAWNSNNLDSKVGGNYNYLYRLFRKSNLKPFERDISTEIYQAGSTPCNGVEGFNCYFPLQSYGFQPTNGVGYQPYRVVVLSFELLHAPATVCGPKKSTNLVKNKCVNFNFNGLTGTGVLTESNKKFLPFQQFGRDIADTTDAVRDGSGGGGDGGGGSGDKTHTCPPCPAPELLGGPSVFLFPPKPKDTLMISRTPEVTCVVVDVSHEDPEVKFNWYVDGVEVHNAKTKPREEQYNSTYRVVSVLTVLHQDWLNGKEYKCKVSNKALPAPIEKTISKAKGQPREPQVYTLPPSREELTKNQVSLTCLVKGFYPSDIAVEWESNGQPENNYKTTPPVLDSDGSFFLYSKLTVDKSRWQQGNVFSCSVMHEALHNHYTQKSLSLSPGS

SEQ ID NO: 126 - DNA, 1503 bp, synthetic construct
  misc_feature 1..1503: note = LS2368 [CTD_short_f-Fc]
  source 1..1503: mol_type = other DNA
agggttcagcccaccgaatcaatagtacggttcccaaatatcactaatctttgccccttcggggaagtatttaacgctactcgatttgctagcgtatatgcctggaaccggaagagaataagcaactgtgttgcagactatagcgtgctttacaattccgcatcctttagtaccttcaaatgttacggtgtgagccccaccaaactcaatgatctctgtttcacaaacgtgtacgcagatagtttcgttatacgcggggacgaagtacggcagatagcccctggccagacaggaaagatagccgattacaactacaaacttccagacgattttacagggtgtgtgatcgcttggaattcaaataacctggactccaaagtgggaggcaactataattacctgtaccgactgttccgcaaaagcaacttgaaacctttcgagcgagatatatcaaccgaaatctaccaagctggttctacaccttgtaatggtgtggagggatttaactgctacttccctcttcagtcctatggatttcagcctacaaatggagtcgggtatcaaccctatagagtcgtggtgttgtcatttgaacttctccatgcacctgctactgtctgtggtccaaaaaagtccactaatcttgtaaaaaacaaatgcgtgaacttcaatttcaatggcctcaccggaacaggtgttttgacagaatctaacaaaaaattccttcccttccagcaattcgggagagatatcgctgacacaaccgacgccgtaagagatggatccggcggcggcggtgacggtggtggcggctccggagacaagacccacacctgccccccttgtcctgcccctgagctgctgggcggaccctccgtgtttctgttcccccccaagcccaaggacaccctgatgatcagccggacccccgaggtcacctgcgtggtggtggacgtcagccacgaggacccagaggtcaagttcaattggtatgtggacggcgtggaggtgcacaacgccaagaccaagccccgggaggaacagtacaacagcacctaccgggtggtgtccgtgctgaccgtgctgcaccaggactggctgaacggcaaagaatacaagtgcaaggtgtccaacaaggccctgcctgcccccatcgagaaaaccatcagcaaggccaagggccagcccagagaaccccaggtgtacaccctgccccctagcagggaagagctgaccaagaaccaggtgtccctgacctgtctggtcaagggcttctaccccagcgatatcgccgtggagtgggagagcaacggccagcctgagaacaactacaagaccaccccccctgtgctggacagcgacggcagcttcttcctgtacagcaagctgaccgtggacaagagccggtggcagcagggcaacgtgtttagctgcagcgtgatgcacgaggccctgcacaaccactacacccagaagagcttaagcctgtcccctggcagttga

SEQ ID NO: 127 - protein, 490 aa, synthetic construct
  REGION 1..490: note = LS2369 [CTD_short_g-Fc]
RVQPTESIVRFPNITNLCPFGEVFNATRFASVYAWNRKRISNCVADYSVLYNSASFSTFKCYGVSPTKLNDLCFTNVYADSFVIRGDEVRQIAPGQTGKIADYNYKLPDDFTGCVIAWNSNNLDSKVGGNYNYLYRLFRKSNLKPFERDISTEIYQAGSTPCNGVEGFNCYFPLQSYGFQPTNGVGYQPYRVVVLSFELLHAPATVCGPKKSTNLVKNKCVNFNFNGLTGTGVLTESNKKFLPFQQFGRDGSGGGGDGGGGSGDKTHTCPPCPAPELLGGPSVFLFPPKPKDTLMISRTPEVTCVVVDVSHEDPEVKFNWYVDGVEVHNAKTKPREEQYNSTYRVVSVLTVLHQDWLNGKEYKCKVSNKALPAPIEKTISKAKGQPREPQVYTLPPSREELTKNQVSLTCLVKGFYPSDIAVEWESNGQPENNYKTTPPVLDSDGSFFLYSKLTVDKSRWQQGNVFSCSVMHEALHNHYTQKSLSLSPGS

SEQ ID NO: 128 - DNA, 1473 bp, synthetic construct
  misc_feature 1..1473: note = LS2369 [CTD_short_g-Fc]
  source 1..1473: mol_type = other DNA
agggttcagcccaccgaatcaatagtacggttcccaaatatcactaatctttgccccttcggggaagtatttaacgctactcgatttgctagcgtatatgcctggaaccggaagagaataagcaactgtgttgcagactatagcgtgctttacaattccgcatcctttagtaccttcaaatgttacggtgtgagccccaccaaactcaatgatctctgtttcacaaacgtgtacgcagatagtttcgttatacgcggggacgaagtacggcagatagcccctggccagacaggaaagatagccgattacaactacaaacttccagacgattttacagggtgtgtgatcgcttggaattcaaataacctggactccaaagtgggaggcaactataattacctgtaccgactgttccgcaaaagcaacttgaaacctttcgagcgagatatatcaaccgaaatctaccaagctggttctacaccttgtaatggtgtggagggatttaactgctacttccctcttcagtcctatggatttcagcctacaaatggagtcgggtatcaaccctatagagtcgtggtgttgtcatttgaacttctccatgcacctgctactgtctgtggtccaaaaaagtccactaatcttgtaaaaaacaaatgcgtgaacttcaatttcaatggcctcaccggaacaggtgttttgacagaatctaacaaaaaattccttcccttccagcaattcgggagagatggatccggcggcggcggtgacggtggtggcggctccggagacaagacccacacctgccccccttgtcctgcccctgagctgctgggcggaccctccgtgtttctgttcccccccaagcccaaggacaccctgatgatcagccggacccccgaggtcacctgcgtggtggtggacgtcagccacgaggacccagaggtcaagttcaattggtatgtggacggcgtggaggtgcacaacgccaagaccaagccccgggaggaacagtacaacagcacctaccgggtggtgtccgtgctgaccgtgctgcaccaggactggctgaacggcaaagaatacaagtgcaaggtgtccaacaaggccctgcctgcccccatcgagaaaaccatcagcaaggccaagggccagcccagagaaccccaggtgtacaccctgccccctagcagggaagagctgaccaagaaccaggtgtccctgacctgtctggtcaagggcttctaccccagcgatatcgccgtggagtgggagagcaacggccagcctgagaacaactacaagaccaccccccctgtgctggacagcgacggcagcttcttcctgtacagcaagctgaccgtggacaagagccggtggcagcagggcaacgtgtttagctgcagcgtgatgcacgaggccctgcacaaccactacacccagaagagcttaagcctgtcccctggcagttga

SEQ ID NO: 129 - protein, 477 aa, synthetic construct
  REGION 1..477: note = LS2370 [CTD_short_h-Fc]
RVQPTESIVRFPNITNLCPFGEVFNATRFASVYAWNRKRISNCVADYSVLYNSASFSTFKCYGVSPTKLNDLCFTNVYADSFVIRGDEVRQIAPGQTGKIADYNYKLPDDFTGCVIAWNSNNLDSKVGGNYNYLYRLFRKSNLKPFERDISTEIYQAGSTPCNGVEGFNCYFPLQSYGFQPTNGVGYQPYRVVVLSFELLHAPATVCGPKKSTNLVKNKCVNFNFNGLTGTGVLTESGSGGGGDGGGGSGDKTHTCPPCPAPELLGGPSVFLFPPKPKDTLMISRTPEVTCVVVDVSHEDPEVKFNWYVDGVEVHNAKTKPREEQYNSTYRVVSVLTVLHQDWLNGKEYKCKVSNKALPAPIEKTISKAKGQPREPQVYTLPPSREELTKNQVSLTCLVKGFYPSDIAVEWESNGQPENNYKTTPPVLDSDGSFFLYSKLTVDKSRWQQGNVFSCSVMHEALHNHYTQKSLSLSPGS

SEQ ID NO: 130 - DNA, 1434 bp, synthetic construct
  misc_feature 1..1434: note = LS2370 [CTD_short_h-Fc]
  source 1..1434: mol_type = other DNA
agggttcagcccaccgaatcaatagtacggttcccaaatatcactaatctttgccccttcggggaagtatttaacgctactcgatttgctagcgtatatgcctggaaccggaagagaataagcaactgtgttgcagactatagcgtgctttacaattccgcatcctttagtaccttcaaatgttacggtgtgagccccaccaaactcaatgatctctgtttcacaaacgtgtacgcagatagtttcgttatacgcggggacgaagtacggcagatagcccctggccagacaggaaagatagccgattacaactacaaacttccagacgattttacagggtgtgtgatcgcttggaattcaaataacctggactccaaagtgggaggcaactataattacctgtaccgactgttccgcaaaagcaacttgaaacctttcgagcgagatatatcaaccgaaatctaccaagctggttctacaccttgtaatggtgtggagggatttaactgctacttccctcttcagtcctatggatttcagcctacaaatggagtcgggtatcaaccctatagagtcgtggtgttgtcatttgaacttctccatgcacctgctactgtctgtggtccaaaaaagtccactaatcttgtaaaaaacaaatgcgtgaacttcaatttcaatggcctcaccggaacaggtgttttgacagaatctggatccggcggcggcggtgacggtggtggcggctccggagacaagacccacacctgccccccttgtcctgcccctgagctgctgggcggaccctccgtgtttctgttcccccccaagcccaaggacaccctgatgatcagccggacccccgaggtcacctgcgtggtggtggacgtcagccacgaggacccagaggtcaagttcaattggtatgtggacggcgtggaggtgcacaacgccaagaccaagccccgggaggaacagtacaacagcacctaccgggtggtgtccgtgctgaccgtgctgcaccaggactggctgaacggcaaagaatacaagtgcaaggtgtccaacaaggccctgcctgcccccatcgagaaaaccatcagcaaggccaagggccagcccagagaaccccaggtgtacaccctgccccctagcagggaagagctgaccaagaaccaggtgtccctgacctgtctggtcaagggcttctaccccagcgatatcgccgtggagtgggagagcaacggccagcctgagaacaactacaagaccaccccccctgtgctggacagcgacggcagcttcttcctgtacagcaagctgaccgtggacaagagccggtggcagcagggcaacgtgtttagctgcagcgtgatgcacgaggccctgcacaaccactacacccagaagagcttaagcctgtcccctggcagttga

SEQ ID NO: 131 - protein, 447 aa, synthetic construct
  REGION 1..447: note = LS2371 [CTD_short_i-Fc]
NITNLCPFGEVFNATRFASVYAWNRKRISNCVADYSVLYNSASFSTFKCYGVSPTKLNDLCFTNVYADSFVIRGDEVRQIAPGQTGKIADYNYKLPDDFTGCVIAWNSNNLDSKVGGNYNYLYRLFRKSNLKPFERDISTEIYQAGSTPCNGVEGFNCYFPLQSYGFQPTNGVGYQPYRVVVLSFELLHAPATVCGPKKSTNLVKNKGSGGGGDGGGGSGDKTHTCPPCPAPELLGGPSVFLFPPKPKDTLMISRTPEVTCVVVDVSHEDPEVKFNWYVDGVEVHNAKTKPREEQYNSTYRVVSVLTVLHQDWLNGKEYKCKVSNKALPAPIEKTISKAKGQPREPQVYTLPPSREELTKNQVSLTCLVKGFYPSDIAVEWESNGQPENNYKTTPPVLDSDGSFFLYSKLTVDKSRWQQGNVFSCSVMHEALHNHYTQKSLSLSPGS

SEQ ID NO: 132 - DNA, 1344 bp, synthetic construct
  misc_feature 1..1344: note = LS2371 [CTD_short_i-Fc]
  source 1..1344: mol_type = other DNA
aatatcactaatctttgccccttcggggaagtatttaacgctactcgatttgctagcgtatatgcctggaaccggaagagaataagcaactgtgttgcagactatagcgtgctttacaattccgcatcctttagtaccttcaaatgttacggtgtgagccccaccaaactcaatgatctctgtttcacaaacgtgtacgcagatagtttcgttatacgcggggacgaagtacggcagatagcccctggccagacaggaaagatagccgattacaactacaaacttccagacgattttacagggtgtgtgatcgcttggaattcaaataacctggactccaaagtgggaggcaactataattacctgtaccgactgttccgcaaaagcaacttgaaacctttcgagcgagatatatcaaccgaaatctaccaagctggttctacaccttgtaatggtgtggagggatttaactgctacttccctcttcagtcctatggatttcagcctacaaatggagtcgggtatcaaccctatagagtcgtggtgttgtcatttgaacttctccatgcacctgctactgtctgtggtccaaaaaagtccactaatcttgtaaaaaacaaaggatccggcggcggcggtgacggtggtggcggctccggagacaagacccacacctgccccccttgtcctgcccctgagctgctgggcggaccctccgtgtttctgttcccccccaagcccaaggacaccctgatgatcagccggacccccgaggtcacctgcgtggtggtggacgtcagccacgaggacccagaggtcaagttcaattggtatgtggacggcgtggaggtgcacaacgccaagaccaagccccgggaggaacagtacaacagcacctaccgggtggtgtccgtgctgaccgtgctgcaccaggactggctgaacggcaaagaatacaagtgcaaggtgtccaacaaggccctgcctgcccccatcgagaaaaccatcagcaaggccaagggccagcccagagaaccccaggtgtacaccctgccccctagcagggaagagctgaccaagaaccaggtgtccctgacctgtctggtcaagggcttctaccccagcgatatcgccgtggagtgggagagcaacggccagcctgagaacaactacaagaccaccccccctgtgctggacagcgacggcagcttcttcctgtacagcaagctgaccgtggacaagagccggtggcagcagggcaacgtgtttagctgcagcgtgatgcacgaggccctgcacaaccactacacccagaagagcttaagcctgtcccctggcagttga

SEQ ID NO: 133 - protein, 400 aa, synthetic construct
  REGION 1..400: note = LS2372 [CTD_veryshort_a-Fc]
SASFSTFKCYGVSPTKLNDLCFTNVYADSFVIRGDEVRQIAPGQTGKIADYNYKLPDDFTGCVIAWNSNNLDSKVGGNYNYLYRLFRKSNLKPFERDISTEIYQAGSTPCNGVEGFNCYFPLQSYGFQPTNGVGYQPYRVVVLSFELLHAPATVCGPKKSGSGGGGDGGGGSGDKTHTCPPCPAPELLGGPSVFLFPPKPKDTLMISRTPEVTCVVVDVSHEDPEVKFNWYVDGVEVHNAKTKPREEQYNSTYRVVSVLTVLHQDWLNGKEYKCKVSNKALPAPIEKTISKAKGQPREPQVYTLPPSREELTKNQVSLTCLVKGFYPSDIAVEWESNGQPENNYKTTPPVLDSDGSFFLYSKLTVDKSRWQQGNVFSCSVMHEALHNHYTQKSLSLSPGS

SEQ ID NO: 134 - DNA, 1203 bp, synthetic construct
  misc_feature 1..1203: note = LS2372 [CTD_veryshort_a-Fc]
  source 1..1203: mol_type = other DNA
tccgcatcctttagtaccttcaaatgttacggtgtgagccccaccaaactcaatgatctctgtttcacaaacgtgtacgcagatagtttcgttatacgcggggacgaagtacggcagatagcccctggccagacaggaaagatagccgattacaactacaaacttccagacgattttacagggtgtgtgatcgcttggaattcaaataacctggactccaaagtgggaggcaactataattacctgtaccgactgttccgcaaaagcaacttgaaacctttcgagcgagatatatcaaccgaaatctaccaagctggttctacaccttgtaatggtgtggagggatttaactgctacttccctcttcagtcctatggatttcagcctacaaatggagtcgggtatcaaccctatagagtcgtggtgttgtcatttgaacttctccatgcacctgctactgtctgtggtccaaaaaagtccggatccggcggcggcggtgacggtggtggcggctccggagacaagacccacacctgccccccttgtcctgcccctgagctgctgggcggaccctccgtgtttctgttcccccccaagcccaaggacaccctgatgatcagccggacccccgaggtcacctgcgtggtggtggacgtcagccacgaggacccagaggtcaagttcaattggtatgtggacggcgtggaggtgcacaacgccaagaccaagccccgggaggaacagtacaacagcacctaccgggtggtgtccgtgctgaccgtgctgcaccaggactggctgaacggcaaagaatacaagtgcaaggtgtccaacaaggccctgcctgcccccatcgagaaaaccatcagcaaggccaagggccagcccagagaaccccaggtgtacaccctgccccctagcagggaagagctgaccaagaaccaggtgtccctgacctgtctggtcaagggcttctaccccagcgatatcgccgtggagtgggagagcaacggccagcctgagaacaactacaagaccaccccccctgtgctggacagcgacggcagcttcttcctgtacagcaagctgaccgtggacaagagccggtggcagcagggcaacgtgtttagctgcagcgtgatgcacgaggccctgcacaaccactacacccagaagagcttaagcctgtcccctggcagttga

SEQ ID NO: 135 - protein, 396 aa, synthetic construct
  REGION 1..396: note = LS2373 [CTD_veryshort_b-Fc]
STFKCYGVSPTKLNDLCFTNVYADSFVIRGDEVRQIAPGQTGKIADYNYKLPDDFTGCVIAWNSNNLDSKVGGNYNYLYRLFRKSNLKPFERDISTEIYQAGSTPCNGVEGFNCYFPLQSYGFQPTNGVGYQPYRVVVLSFELLHAPATVCGPKKSGSGGGGDGGGGSGDKTHTCPPCPAPELLGGPSVFLFPPKPKDTLMISRTPEVTCVVVDVSHEDPEVKFNWYVDGVEVHNAKTKPREEQYNSTYRVVSVLTVLHQDWLNGKEYKCKVSNKALPAPIEKTISKAKGQPREPQVYTLPPSREELTKNQVSLTCLVKGFYPSDIAVEWESNGQPENNYKTTPPVLDSDGSFFLYSKLTVDKSRWQQGNVFSCSVMHEALHNHYTQKSLSLSPGS

SEQ ID NO: 136 - DNA, 1191 bp, synthetic construct
  misc_feature 1..1191: note = LS2373 [CTD_veryshort_b-Fc]
  source 1..1191: mol_type = other DNA
agtaccttcaaatgttacggtgtgagccccaccaaactcaatgatctctgtttcacaaacgtgtacgcagatagtttcgttatacgcggggacgaagtacggcagatagcccctggccagacaggaaagatagccgattacaactacaaacttccagacgattttacagggtgtgtgatcgcttggaattcaaataacctggactccaaagtgggaggcaactataattacctgtaccgactgttccgcaaaagcaacttgaaacctttcgagcgagatatatcaaccgaaatctaccaagctggttctacaccttgtaatggtgtggagggatttaactgctacttccctcttcagtcctatggatttcagcctacaaatggagtcgggtatcaaccctatagagtcgtggtgttgtcatttgaacttctccatgcacctgctactgtctgtggtccaaaaaagtccggatccggcggcggcggtgacggtggtggcggctccggagacaagacccacacctgccccccttgtcctgcccctgagctgctgggcggaccctccgtgtttctgttcccccccaagcccaaggacaccctgatgatcagccggacccccgaggtcacctgcgtggtggtggacgtcagccacgaggacccagaggtcaagttcaattggtatgtggacggcgtggaggtgcacaacgccaagaccaagccccgggaggaacagtacaacagcacctaccgggtggtgtccgtgctgaccgtgctgcaccaggactggctgaacggcaaagaatacaagtgcaaggtgtccaacaaggccctgcctgcccccatcgagaaaaccatcagcaaggccaagggccagcccagagaaccccaggtgtacaccctgccccctagcagggaagagctgaccaagaaccaggtgtccctgacctgtctggtcaagggcttctaccccagcgatatcgccgtggagtgggagagcaacggccagcctgagaacaactacaagaccaccccccctgtgctggacagcgacggcagcttcttcctgtacagcaagctgaccgtggacaagagccggtggcagcagggcaacgtgtttagctgcagcgtgatgcacgaggccctgcacaaccactacacccagaagagcttaagcctgtcccctggcagttga

SEQ ID NO: 137 - protein, 396 aa, synthetic construct
  REGION 1..396: note = LS2374 [CTD_veryshort_c-Fc]
SASFSTFKCYGVSPTKLNDLCFTNVYADSFVIRGDEVRQIAPGQTGKIADYNYKLPDDFTGCVIAWNSNNLDSKVGGNYNYLYRLFRKSNLKPFERDISTEIYQAGSTPCNGVEGFNCYFPLQSYGFQPTNGVGYQPYRVVVLSFELLHAPATVCGGSGGGGDGGGGSGDKTHTCPPCPAPELLGGPSVFLFPPKPKDTLMISRTPEVTCVVVDVSHEDPEVKFNWYVDGVEVHNAKTKPREEQYNSTYRVVSVLTVLHQDWLNGKEYKCKVSNKALPAPIEKTISKAKGQPREPQVYTLPPSREELTKNQVSLTCLVKGFYPSDIAVEWESNGQPENNYKTTPPVLDSDGSFFLYSKLTVDKSRWQQGNVFSCSVMHEALHNHYTQKSLSLSPGS

SEQ ID NO: 138 - DNA, 1191 bp, synthetic construct
  misc_feature 1..1191: note = LS2374 [CTD_veryshort_c-Fc]
  source 1..1191: mol_type = other DNA
tccgcatcctttagtaccttcaaatgttacggtgtgagccccaccaaactcaatgatctctgtttcacaaacgtgtacgcagatagtttcgttatacgcggggacgaagtacggcagatagcccctggccagacaggaaagatagccgattacaactacaaacttccagacgattttacagggtgtgtgatcgcttggaattcaaataacctggactccaaagtgggaggcaactataattacctgtaccgactgttccgcaaaagcaacttgaaacctttcgagcgagatatatcaaccgaaatctaccaagctggttctacaccttgtaatggtgtggagggatttaactgctacttccctcttcagtcctatggatttcagcctacaaatggagtcgggtatcaaccctatagagtcgtggtgttgtcatttgaacttctccatgcacctgctactgtctgtggtggatccggcggcggcggtgacggtggtggcggctccggagacaagacccacacctgccccccttgtcctgcccctgagctgctgggcggaccctccgtgtttctgttcccccccaagcccaaggacaccctgatgatcagccggacccccgaggtcacctgcgtggtggtggacgtcagccacgaggacccagaggtcaagttcaattggtatgtggacggcgtggaggtgcacaacgccaagaccaagccccgggaggaacagtacaacagcacctaccgggtggtgtccgtgctgaccgtgctgcaccaggactggctgaacggcaaagaatacaagtgcaaggtgtccaacaaggccctgcctgcccccatcgagaaaaccatcagcaaggccaagggccagcccagagaaccccaggtgtacaccctgccccctagcagggaagagctgaccaagaaccaggtgtccctgacctgtctggtcaagggcttctaccccagcgatatcgccgtggagtgggagagcaacggccagcctgagaacaactacaagaccaccccccctgtgctggacagcgacggcagcttcttcctgtacagcaagctgaccgtggacaagagccggtggcagcagggcaacgtgtttagctgcagcgtgatgcacgaggccctgcacaaccactacacccagaagagcttaagcctgtcccctggcagttga

SEQ ID NO: 139 - protein, 407 aa, synthetic construct
  REGION 1..407: note = LS2375 [CTD_veryshort_d-Fc]
DYSVLYNSASFSTFKCYGVSPTKLNDLCFTNVYADSFVIRGDEVRQIAPGQTGKIADYNYKLPDDFTGCVIAWNSNNLDSKVGGNYNYLYRLFRKSNLKPFERDISTEIYQAGSTPCNGVEGFNCYFPLQSYGFQPTNGVGYQPYRVVVLSFELLHAPATVCGPKKSGSGGGGDGGGGSGDKTHTCPPCPAPELLGGPSVFLFPPKPKDTLMISRTPEVTCVVVDVSHEDPEVKFNWYVDGVEVHNAKTKPREEQYNSTYRVVSVLTVLHQDWLNGKEYKCKVSNKALPAPIEKTISKAKGQPREPQVYTLPPSREELTKNQVSLTCLVKGFYPSDIAVEWESNGQPENNYKTTPPVLDSDGSFFLYSKLTVDKSRWQQGNVFSCSVMHEALHNHYTQKSLSLSPGS

SEQ ID NO: 140 - DNA, 1224 bp, synthetic construct
  misc_feature 1..1224: note = LS2375 [CTD_veryshort_d-Fc]
  source 1..1224: mol_type = other DNA
gactatagcgtgctttacaattccgcatcctttagtaccttcaaatgttacggtgtgagccccaccaaactcaatgatctctgtttcacaaacgtgtacgcagatagtttcgttatacgcggggacgaagtacggcagatagcccctggccagacaggaaagatagccgattacaactacaaacttccagacgattttacagggtgtgtgatcgcttggaattcaaataacctggactccaaagtgggaggcaactataattacctgtaccgactgttccgcaaaagcaacttgaaacctttcgagcgagatatatcaaccgaaatctaccaagctggttctacaccttgtaatggtgtggagggatttaactgctacttccctcttcagtcctatggatttcagcctacaaatggagtcgggtatcaaccctatagagtcgtggtgttgtcatttgaacttctccatgcacctgctactgtctgtggtccaaaaaagtccggatccggcggcggcggtgacggtggtggcggctccggagacaagacccacacctgccccccttgtcctgcccctgagctgctgggcggaccctccgtgtttctgttcccccccaagcccaaggacaccctgatgatcagccggacccccgaggtcacctgcgtggtggtggacgtcagccacgaggacccagaggtcaagttcaattggtatgtggacggcgtggaggtgcacaacgccaagaccaagccccgggaggaacagtacaacagcacctaccgggtggtgtccgtgctgaccgtgctgcaccaggactggctgaacggcaaagaatacaagtgcaaggtgtccaacaaggccctgcctgcccccatcgagaaaaccatcagcaaggccaagggccagcccagagaaccccaggtgtacaccctgccccctagcagggaagagctgaccaagaaccaggtgtccctgacctgtctggtcaagggcttctaccccagcgatatcgccgtggagtgggagagcaacggccagcctgagaacaactacaagaccaccccccctgtgctggacagcgacggcagcttcttcctgtacagcaagctgaccgtggacaagagccggtggcagcagggcaacgtgtttagctgcagcgtgatgcacgaggccctgcacaaccactacacccagaagagcttaagcctgtcccctggcagttga

SEQ ID NO: 141 - protein, 403 aa, synthetic construct
  REGION 1..403: note = LS2376 [CTD_veryshort_e-Fc]
DYSVLYNSASFSTFKCYGVSPTKLNDLCFTNVYADSFVIRGDEVRQIAPGQTGKIADYNYKLPDDFTGCVIAWNSNNLDSKVGGNYNYLYRLFRKSNLKPFERDISTEIYQAGSTPCNGVEGFNCYFPLQSYGFQPTNGVGYQPYRVVVLSFELLHAPATVCGGSGGGGDGGGGSGDKTHTCPPCPAPELLGGPSVFLFPPKPKDTLMISRTPEVTCVVVDVSHEDPEVKFNWYVDGVEVHNAKTKPREEQYNSTYRVVSVLTVLHQDWLNGKEYKCKVSNKALPAPIEKTISKAKGQPREPQVYTLPPSREELTKNQVSLTCLVKGFYPSDIAVEWESNGQPENNYKTTPPVLDSDGSFFLYSKLTVDKSRWQQGNVFSCSVMHEALHNHYTQKSLSLSPGS

SEQ ID NO: 142 - DNA, 1212 bp, synthetic construct
  misc_feature 1..1212: note = LS2376 [CTD_veryshort_e-Fc]
  source 1..1212: mol_type = other DNA
gactatagcgtgctttacaattccgcatcctttagtaccttcaaatgttacggtgtgagccccaccaaactcaatgatctctgtttcacaaacgtgtacgcagatagtttcgttatacgcggggacgaagtacggcagatagcccctggccagacaggaaagatagccgattacaactacaaacttccagacgattttacagggtgtgtgatcgcttggaattcaaataacctggactccaaagtgggaggcaactataattacctgtaccgactgttccgcaaaagcaacttgaaacctttcgagcgagatatatcaaccgaaatctaccaagctggttctacaccttgtaatggtgtggagggatttaactgctacttccctcttcagtcctatggatttcagcctacaaatggagtcgggtatcaaccctatagagtcgtggtgttgtcatttgaacttctccatgcacctgctactgtctgtggtggatccggcggcggcggtgacggtggtggcggctccggagacaagacccacacctgccccccttgtcctgcccctgagctgctgggcggaccctccgtgtttctgttcccccccaagcccaaggacaccctgatgatcagccggacccccgaggtcacctgcgtggtggtggacgtcagccacgaggacccagaggtcaagttcaattggtatgtggacggcgtggaggtgcacaacgccaagaccaagccccgggaggaacagtacaacagcacctaccgggtggtgtccgtgctgaccgtgctgcaccaggactggctgaacggcaaagaatacaagtgcaaggtgtccaacaaggccctgcctgcccccatcgagaaaaccatcagcaaggccaagggccagcccagagaaccccaggtgtacaccctgccccctagcagggaagagctgaccaagaaccaggtgtccctgacctgtctggtcaagggcttctaccccagcgatatcgccgtggagtgggagagcaacggccagcctgagaacaactacaagaccaccccccctgtgctggacagcgacggcagcttcttcctgtacagcaagctgaccgtggacaagagccggtggcagcagggcaacgtgtttagctgcagcgtgatgcacgaggccctgcacaaccactacacccagaagagcttaagcctgtcccctggcagttga

SEQ ID NO: 143 - protein, 310 aa, synthetic construct
  REGION 1..310: note = LS2377 [RBD_a-Fc]
NSNNLDSKVGGNYNYLYRLFRKSNLKPFERDISTEIYQAGSTPCNGVEGFNCYFPLQSYGFQPTNGVGYQGSGGGGDGGGGSGDKTHTCPPCPAPELLGGPSVFLFPPKPKDTLMISRTPEVTCVVVDVSHEDPEVKFNWYVDGVEVHNAKTKPREEQYNSTYRVVSVLTVLHQDWLNGKEYKCKVSNKALPAPIEKTISKAKGQPREPQVYTLPPSREELTKNQVSLTCLVKGFYPSDIAVEWESNGQPENNYKTTPPVLDSDGSFFLYSKLTVDKSRWQQGNVFSCSVMHEALHNHYTQKSLSLSPGS

SEQ ID NO: 144 - DNA, 933 bp, synthetic construct
  misc_feature 1..933: note = LS2377 [RBD_a-Fc]
  source 1..933: mol_type = other DNA
aattcaaataacctggactccaaagtgggaggcaactataattacctgtaccgactgttccgcaaaagcaacttgaaacctttcgagcgagatatatcaaccgaaatctaccaagctggttctacaccttgtaatggtgtggagggatttaactgctacttccctcttcagtcctatggatttcagcctacaaatggagtcgggtatcaaggatccggcggcggcggtgacggtggtggcggctccggagacaagacccacacctgccccccttgtcctgcccctgagctgctgggcggaccctccgtgtttctgttcccccccaagcccaaggacaccctgatgatcagccggacccccgaggtcacctgcgtggtggtggacgtcagccacgaggacccagaggtcaagttcaattggtatgtggacggcgtggaggtgcacaacgccaagaccaagccccgggaggaacagtacaacagcacctaccgggtggtgtccgtgctgaccgtgctgcaccaggactggctgaacggcaaagaatacaagtgcaaggtgtccaacaaggccctgcctgcccccatcgagaaaaccatcagcaaggccaagggccagcccagagaaccccaggtgtacaccctgccccctagcagggaagagctgaccaagaaccaggtgtccctgacctgtctggtcaagggcttctaccccagcgatatcgccgtggagtgggagagcaacggccagcctgagaacaactacaagaccaccccccctgtgctggacagcgacggcagcttcttcctgtacagcaagctgaccgtggacaagagccggtggcagcagggcaacgtgtttagctgcagcgtgatgcacgaggccctgcacaaccactacacccagaagagcttaagcctgtcccctggcagttga

SEQ ID NO: 145 - protein, 362 aa, synthetic construct
  REGION 1..362: note = LS2378 [RBD_b-Fc]
TKLNDLCFTNVYADSFVIRGDEVRQIAPGQTGKIADYNYKLPDDFTGCVIAWNSNNLDSKVGGNYNYLYRLFRKSNLKPFERDISTEIYQAGSTPCNGVEGFNCYFPLQSYGFQPTNGVGYQGSGGGGDGGGGSGDKTHTCPPCPAPELLGGPSVFLFPPKPKDTLMISRTPEVTCVVVDVSHEDPEVKFNWYVDGVEVHNAKTKPREEQYNSTYRVVSVLTVLHQDWLNGKEYKCKVSNKALPAPIEKTISKAKGQPREPQVYTLPPSREELTKNQVSLTCLVKGFYPSDIAVEWESNGQPENNYKTTPPVLDSDGSFFLYSKLTVDKSRWQQGNVFSCSVMHEALHNHYTQKSLSLSPGS

SEQ ID NO: 146 - DNA, 1089 bp, synthetic construct
  misc_feature 1..1089: note = LS2378 [RBD_b-Fc]
  source 1..1089: mol_type = other DNA
accaaactcaatgatctctgtttcacaaacgtgtacgcagatagtttcgttatacgcggggacgaagtacggcagatagcccctggccagacaggaaagatagccgattacaactacaaacttccagacgattttacagggtgtgtgatcgcttggaattcaaataacctggactccaaagtgggaggcaactataattacctgtaccgactgttccgcaaaagcaacttgaaacctttcgagcgagatatatcaaccgaaatctaccaagctggttctacaccttgtaatggtgtggagggatttaactgctacttccctcttcagtcctatggatttcagcctacaaatggagtcgggtatcaaggatccggcggcggcggtgacggtggtggcggctccggagacaagacccacacctgccccccttgtcctgcccctgagctgctgggcggaccctccgtgtttctgttcccccccaagcccaaggacaccctgatgatcagccggacccccgaggtcacctgcgtggtggtggacgtcagccacgaggacccagaggtcaagttcaattggtatgtggacggcgtggaggtgcacaacgccaagaccaagccccgggaggaacagtacaacagcacctaccgggtggtgtccgtgctgaccgtgctgcaccaggactggctgaacggcaaagaatacaagtgcaaggtgtccaacaaggccctgcctgcccccatcgagaaaaccatcagcaaggccaagggccagcccagagaaccccaggtgtacaccctgccccctagcagggaagagctgaccaagaaccaggtgtccctgacctgtctggtcaagggcttctaccccagcgatatcgccgtggagtgggagagcaacggccagcctgagaacaactacaagaccaccccccctgtgctggacagcgacggcagcttcttcctgtacagcaagctgaccgtggacaagagccggtggcagcagggcaacgtgtttagctgcagcgtgatgcacgaggccctgcacaaccactacacccagaagagcttaagcctgtcccctggcagttga

SEQ ID NO: 147 - protein, 320 aa, synthetic construct
  REGION 1..320: note = LS2379 [RBD_c-Fc]
NSNNLDSKVGGNYNYLYRLFRKSNLKPFERDISTEIYQAGSTPCNGVEGFNCYFPLQSYGFQPTNGVGYQPYRVVVLSFEGSGGGGDGGGGSGDKTHTCPPCPAPELLGGPSVFLFPPKPKDTLMISRTPEVTCVVVDVSHEDPEVKFNWYVDGVEVHNAKTKPREEQYNSTYRVVSVLTVLHQDWLNGKEYKCKVSNKALPAPIEKTISKAKGQPREPQVYTLPPSREELTKNQVSLTCLVKGFYPSDIAVEWESNGQPENNYKTTPPVLDSDGSFFLYSKLTVDKSRWQQGNVFSCSVMHEALHNHYTQKSLSLSPGS

SEQ ID NO: 148 - DNA, 963 bp, synthetic construct
  misc_feature 1..963: note = LS2379 [RBD_c-Fc]
  source 1..963: mol_type = other DNA
aattcaaataacctggactccaaagtgggaggcaactataattacctgtaccgactgttccgcaaaagcaacttgaaacctttcgagcgagatatatcaaccgaaatctaccaagctggttctacaccttgtaatggtgtggagggatttaactgctacttccctcttcagtcctatggatttcagcctacaaatggagtcgggtatcaaccctatagagtcgtggtgttgtcatttgaaggatccggcggcggcggtgacggtggtggcggctccggagacaagacccacacctgccccccttgtcctgcccctgagctgctgggcggaccctccgtgtttctgttcccccccaagcccaaggacaccctgatgatcagccggacccccgaggtcacctgcgtggtggtggacgtcagccacgaggacccagaggtcaagttcaattggtatgtggacggcgtggaggtgcacaacgccaagaccaagccccgggaggaacagtacaacagcacctaccgggtggtgtccgtgctgaccgtgctgcaccaggactggctgaacggcaaagaatacaagtgcaaggtgtccaacaaggccctgcctgcccccatcgagaaaaccatcagcaaggccaagggccagcccagagaaccccaggtgtacaccctgccccctagcagggaagagctgaccaagaaccaggtgtccctgacctgtctggtcaagggcttctaccccagcgatatcgccgtggagtgggagagcaacggccagcctgagaacaactacaagaccaccccccctgtgctggacagcgacggcagcttcttcctgtacagcaagctgaccgtggacaagagccggtggcagcagggcaacgtgtttagctgcagcgtgatgcacgaggccctgcacaaccactacacccagaagagcttaagcctgtcccctggcagttga

SEQ ID NO: 149 - protein, 298 aa, synthetic construct
  REGION 1..298: note = LS2380 [RBD_d-Fc]
GVSPTKLNDLCFTNVYADSFVIRGDEVRQIAPGQTGKIADYNYKLPDDFTGCVIAWNSGSGGGGDGGGGSGDKTHTCPPCPAPELLGGPSVFLFPPKPKDTLMISRTPEVTCVVVDVSHEDPEVKFNWYVDGVEVHNAKTKPREEQYNSTYRVVSVLTVLHQDWLNGKEYKCKVSNKALPAPIEKTISKAKGQPREPQVYTLPPSREELTKNQVSLTCLVKGFYPSDIAVEWESNGQPENNYKTTPPVLDSDGSFFLYSKLTVDKSRWQQGNVFSCSVMHEALHNHYTQKSLSLSPGS

SEQ ID NO: 150 - DNA, 897 bp, synthetic construct
  misc_feature 1..897: note = LS2380 [RBD_d-Fc]
  source 1..897: mol_type = other DNA
ggtgtgagccccaccaaactcaatgatctctgtttcacaaacgtgtacgcagatagtttcgttatacgcggggacgaagtacggcagatagcccctggccagacaggaaagatagccgattacaactacaaacttccagacgattttacagggtgtgtgatcgcttggaattcaggatccggcggcggcggtgacggtggtggcggctccggagacaagacccacacctgccccccttgtcctgcccctgagctgctgggcggaccctccgtgtttctgttcccccccaagcccaaggacaccctgatgatcagccggacccccgaggtcacctgcgtggtggtggacgtcagccacgaggacccagaggtcaagttcaattggtatgtggacggcgtggaggtgcacaacgccaagaccaagccccgggaggaacagtacaacagcacctaccgggtggtgtccgtgctgaccgtgctgcaccaggactggctgaacggcaaagaatacaagtgcaaggtgtccaacaaggccctgcctgcccccatcgagaaaaccatcagcaaggccaagggccagcccagagaaccccaggtgtacaccctgccccctagcagggaagagctgaccaagaaccaggtgtccctgacctgtctggtcaagggcttctaccccagcgatatcgccgtggagtgggagagcaacggccagcctgagaacaactacaagaccaccccccctgtgctggacagcgacggcagcttcttcctgtacagcaagctgaccgtggacaagagccggtggcagcagggcaacgtgtttagctgcagcgtgatgcacgaggccctgcacaaccactacacccagaagagcttaagcctgtcccctggcagttga

SEQ ID NO: 151 - protein, 316 aa, synthetic construct
  REGION 1..316: note = LS2381 [RBD_e-Fc]
IAWNSNNLDSKVGGNYNYLYRLFRKSNLKPFERDISTEIYQAGSTPCNGVEGFNCYFPLQSYGFQPTNGVGYQPYRGSGGGGDGGGGSGDKTHTCPPCPAPELLGGPSVFLFPPKPKDTLMISRTPEVTCVVVDVSHEDPEVKFNWYVDGVEVHNAKTKPREEQYNSTYRVVSVLTVLHQDWLNGKEYKCKVSNKALPAPIEKTISKAKGQPREPQVYTLPPSREELTKNQVSLTCLVKGFYPSDIAVEWESNGQPENNYKTTPPVLDSDGSFFLYSKLTVDKSRWQQGNVFSCSVMHEALHNHYTQKSLSLSPGS

SEQ ID NO: 152 - DNA, 951 bp, synthetic construct
  misc_feature 1..951: note = LS2381 [RBD_e-Fc]
  source 1..951: mol_type = other DNA
atcgcttggaattcaaataacctggactccaaagtgggaggcaactataattacctgtaccgactgttccgcaaaagcaacttgaaacctttcgagcgagatatatcaaccgaaatctaccaagctggttctacaccttgtaatggtgtggagggatttaactgctacttccctcttcagtcctatggatttcagcctacaaatggagtcgggtatcaaccctatagaggatccggcggcggcggtgacggtggtggcggctccggagacaagacccacacctgccccccttgtcctgcccctgagctgctgggcggaccctccgtgtttctgttcccccccaagcccaaggacaccctgatgatcagccggacccccgaggtcacctgcgtggtggtggacgtcagccacgaggacccagaggtcaagttcaattggtatgtggacggcgtggaggtgcacaacgccaagaccaagccccgggaggaacagtacaacagcacctaccgggtggtgtccgtgctgaccgtgctgcaccaggactggctgaacggcaaagaatacaagtgcaaggtgtccaacaaggccctgcctgcccccatcgagaaaaccatcagcaaggccaagggccagcccagagaaccccaggtgtacaccctgccccctagcagggaagagctgaccaagaaccaggtgtccctgacctgtctggtcaagggcttctaccccagcgatatcgccgtggagtgggagagcaacggccagcctgagaacaactacaagaccaccccccctgtgctggacagcgacggcagcttcttcctgtacagcaagctgaccgtggacaagagccggtggcagcagggcaacgtgtttagctgcagcgtgatgcacgaggccctgcacaaccactacacccagaagagcttaagcctgtcccctggcagttga

SEQ ID NO: 153 - protein, 504 aa, synthetic construct
  REGION 1..504: note = LS2382 [NTD_short_a-Fc]
RGVYYPDKVFRSSVLHSTQDLFLPFFSNVTWFHAIHVSGTNGTKRFDNPVLPFNDGVYFASTEKSNIIRGWIFGTTLDSKTQSLLIVNNATNVVIKVCEFQFCNDPFLGVYYHKNNKSWMESEFRVYSSANNCTFEYVSQPFLMDLEGKQGNFKNLREFVFKNIDGYFKIYSKHTPINLVRDLPQGFSALEPLVDLPIGINITRFQTLLALHRSYLTPGDSSSGWTAGAAAYYVGYLQPRTFLLKYNENGTITDAVDCALDPLSGSGGGGDGGGGSGDKTHTCPPCPAPELLGGPSVFLFPPKPKDTLMISRTPEVTCVVVDVSHEDPEVKFNWYVDGVEVHNAKTKPREEQYNSTYRVVSVLTVLHQDWLNGKEYKCKVSNKALPAPIEKTISKAKGQPREPQVYTLPPSREELTKNQVSLTCLVKGFYPSDIAVEWESNGQPENNYKTTPPVLDSDGSFFLYSKLTVDKSRWQQGNVFSCSVMHEALHNHYTQKSLSLSPGS

SEQ ID NO: 154 - DNA, 1515 bp, synthetic construct
  misc_feature 1..1515: note = LS2382 [NTD_short_a-Fc]
  source 1..1515: mol_type = other DNA
cgtggtgtatactaccccgataaggtttttcgctcttccgtgctccatagtacacaggatctcttcctgccattcttcagtaatgtcacctggtttcatgctattcatgtgtctggaactaatggaaccaagcgctttgataatccagtactcccttttaatgacggagtttacttcgcaagcacagaaaagtccaatatcatacgcgggtggattttcggaactaccctcgactccaagactcaatcactccttatagtcaataacgccaccaatgtggtcatcaaagtctgtgaatttcaattttgcaacgacccattcctgggcgtctactatcataaaaacaataagagctggatggaatccgaatttagagtatacagttctgctaataattgcacattcgaatatgtatcccaacccttccttatggatttggagggcaagcaaggcaatttcaaaaacttgcgggaatttgtcttcaaaaacatagatgggtacttcaaaatttatagtaagcatacacctattaacttggttcgagacttgcctcagggcttcagcgcccttgaacctcttgtggatttgccaatcggcatcaatataacacgatttcagacactcttggcactgcatcgttcctacctgactccaggagactctagctctggttggacagcaggcgccgctgcttactatgtcggctacttgcaacctcgaacattccttctcaaatataacgaaaatggaactatcacagatgccgtggattgtgccttggaccctctctcaggatccggcggcggcggtgacggtggtggcggctccggagacaagacccacacctgccccccttgtcctgcccctgagctgctgggcggaccctccgtgtttctgttcccccccaagcccaaggacaccctgatgatcagccggacccccgaggtcacctgcgtggtggtggacgtcagccacgaggacccagaggtcaagttcaattggtatgtggacggcgtggaggtgcacaacgccaagaccaagccccgggaggaacagtacaacagcacctaccgggtggtgtccgtgctgaccgtgctgcaccaggactggctgaacggcaaagaatacaagtgcaaggtgtccaacaaggccctgcctgcccccatcgagaaaaccatcagcaaggccaagggccagcccagagaaccccaggtgtacaccctgccccctagcagggaagagctgaccaagaaccaggtgtccctgacctgtctggtcaagggcttctaccccagcgatatcgccgtggagtgggagagcaacggccagcctgagaacaactacaagaccaccccccctgtgctggacagcgacggcagcttcttcctgtacagcaagctgaccgtggacaagagccggtggcagcagggcaacgtgtttagctgcagcgtgatgcacgaggccctgcacaaccactacacccagaagagcttaagcctgtcccctggcagttga

SEQ ID NO: 155 - protein, 404 aa, synthetic construct
  REGION 1..404: note = LS2393 [(RBD-tight)2-Fc]
GDEMGTIAWNSNNLDSKVGGNYNYLYRLFRKSNLKPFERDISTEIYQAGSTPCNGVEGFNCYFPLQSYGFQPTNGVGYQPYRSGGGGSIAWNSNNLDSKVGGNYNYLYRLFRKSNLKPFERDISTEIYQAGSTPCNGVEGFNCYFPLQSYGFQPTNGVGYQPYRGSGGGGDGGGGSGDKTHTCPPCPAPELLGGPSVFLFPPKPKDTLMISRTPEVTCVVVDVSHEDPEVKFNWYVDGVEVHNAKTKPREEQYNSTYRVVSVLTVLHQDWLNGKEYKCKVSNKALPAPIEKTISKAKGQPREPQVYTLPPSREELTKNQVSLTCLVKGFYPSDIAVEWESNGQPENNYKTTPPVLDSDGSFFLYSKLTVDKSRWQQGNVFSCSVMHEALHNHYTQKSLSLSPGS

SEQ ID NO: 156 - DNA, 1215 bp, synthetic construct
  misc_feature 1..1215: note = LS2393 [(RBD-tight)2-Fc]
  source 1..1215: mol_type = other DNA
ggcgatgagatgggtaccatcgcatggaacagcaacaacctggatagcaaagtgggcggcaactataattacctgtatcgactcttcagaaagagtaatctgaagcctttcgaaagggatatcagtactgaaatatatcaggctggcagtactccttgcaatggagtagagggctttaactgttatttcccacttcagtcatacggttttcagcccaccaacggagtcggctatcagccttacagatcagggggcggaggaagtatcgcatggaactccaataatctcgacagcaaagtcggaggcaattacaattatctgtataggctcttcagaaaaagtaacctcaagccgttcgaacgggatatcagcactgagatataccaagccgggagtacaccctgtaacggagtcgagggctttaactgttacttccctctacagtcctatggctttcagcccaccaatggcgttgggtatcagccttatagaggatccggcggcggcggtgacggtggtggcggctccggagacaagacccacacctgccccccttgtcctgcccctgagctgctgggcggaccctccgtgtttctgttcccccccaagcccaaggacaccctgatgatcagccggacccccgaggtcacctgcgtggtggtggacgtcagccacgaggacccagaggtcaagttcaattggtatgtggacggcgtggaggtgcacaacgccaagaccaagccccgggaggaacagtacaacagcacctaccgggtggtgtccgtgctgaccgtgctgcaccaggactggctgaacggcaaagaatacaagtgcaaggtgtccaacaaggccctgcctgcccccatcgagaaaaccatcagcaaggccaagggccagcccagagaaccccaggtgtacaccctgccccctagcagggaagagctgaccaagaaccaggtgtccctgacctgtctggtcaagggcttctaccccagcgatatcgccgtggagtgggagagcaacggccagcctgagaacaactacaagaccaccccccctgtgctggacagcgacggcagcttcttcctgtacagcaagctgaccgtggacaagagccggtggcagcagggcaacgtgtttagctgcagcgtgatgcacgaggccctgcacaaccactacacccagaagagcttaagcctgtcccctggcagttga

SEQ ID NO: 157 - protein, 430 aa, synthetic construct
  REGION 1..430: note = LS2394 [(RBD-extended)2-Fc]
GDEMGTIAWNSNNLDSKVGGNYNYLYRLFRKSNLKPFERDISTEIYQAGSTPCNGVEGFNCYFPLQSYGFQPTNGVGYQPYRVVVLSFELLHAPATGGGSIAWNSNNLDSKVGGNYNYLYRLFRKSNLKPFERDISTEIYQAGSTPCNGVEGFNCYFPLQSYGFQPTNGVGYQPYRVVVLSFELLHAPATGSGGGGDGGGGSGDKTHTCPPCPAPELLGGPSVFLFPPKPKDTLMISRTPEVTCVVVDVSHEDPEVKFNWYVDGVEVHNAKTKPREEQYNSTYRVVSVLTVLHQDWLNGKEYKCKVSNKALPAPIEKTISKAKGQPREPQVYTLPPSREELTKNQVSLTCLVKGFYPSDIAVEWESNGQPENNYKTTPPVLDSDGSFFLYSKLTVDKSRWQQGNVFSCSVMHEALHNHYTQKSLSLSPGS

SEQ ID NO: 158 - DNA, 1293 bp, synthetic construct
  misc_feature 1..1293: note = LS2394 [(RBD-extended)2-Fc]
  source 1..1293: mol_type = other DNA
ggcgatgagatgggtaccattgcatggaattcaaacaacctggattccaaggtcggtggtaattacaactatctatacagactgttccgaaagagcaacttgaaaccctttgaacgtgatatctccacagaaatttatcaggccggttccaccccttgcaacggcgttgagggttttaactgctattttccgctgcagagctacggttttcagccaactaatggagttggatatcaaccttaccgggtggttgtgctatccttcgaattgctccatgctcctgctaccggtggcggcagcatcgcatggaacagcaataatttggatagtaaagtgggcgggaattataactacctgtaccggctgttcagaaagagcaatctgaaaccttttgagcgggacatttccactgagatctaccaggccggcagcaccccctgtaacggagtcgaaggattcaattgttacttcccacttcaaagctatggattccaacctacaaatggggtcggctatcaaccatatcgcgttgtggtcttgtcctttgagcttttgcatgcccctgccactggatccggcggcggcggtgacggtggtggcggctccggagacaagacccacacctgccccccttgtcctgcccctgagctgctgggcggaccctccgtgtttctgttcccccccaagcccaaggacaccctgatgatcagccggacccccgaggtcacctgcgtggtggtggacgtcagccacgaggacccagaggtcaagttcaattggtatgtggacggcgtggaggtgcacaacgccaagaccaagccccgggaggaacagtacaacagcacctaccgggtggtgtccgtgctgaccgtgctgcaccaggactggctgaacggcaaagaatacaagtgcaaggtgtccaacaaggccctgcctgcccccatcgagaaaaccatcagcaaggccaagggccagcccagagaaccccaggtgtacaccctgccccctagcagggaagagctgaccaagaaccaggtgtccctgacctgtctggtcaagggcttctaccccagcgatatcgccgtggagtgggagagcaacggccagcctgagaacaactacaagaccaccccccctgtgctggacagcgacggcagcttcttcctgtacagcaagctgaccgtggacaagagccggtggcagcagggcaacgtgtttagctgcagcgtgatgcacgaggccctgcacaaccactacacccagaagagcttaagcctgtcccctggcagttga

SEQ ID NO: 159 - protein, 404 aa, synthetic construct; identical to SEQ ID NO: 155
  REGION 1..404: note = LS2395 [(RBD)2-Fc]

SEQ ID NO: 160 - DNA, 1215 bp, synthetic construct
  misc_feature 1..1215: note = LS2395 [(RBD)2-Fc]
  source 1..1215: mol_type = other DNA
ggcgatgagatgggtaccatcgcttggaactccaacaatctggactccaaagtgggcggaaattacaattatctgtatcgcctcttccgtaagtctaacctcaagccttttgagagagacatctccactgagatatatcaggccggatcaactccctgtaacggtgtagaagggttcaattgctatttcccactgcagagttacggttttcagcccactaatggcgttggataccaaccctacaggtcaggaggcgggggatctattgcctggaactcaaataatctcgattctaaggttggcggtaactataattatctctatcggctgttccgcaaatccaaccttaaaccctttgagcgtgatataagtactgagatttaccaagcagggagcaccccctgcaatggcgtggaagggttcaactgctacttccccctccaaagctatggatttcagccaactaacggcgttggttaccagccctatagaggatccggcggcggcggtgacggtggtggcggctccggagacaagacccacacctgccccccttgtcctgcccctgagctgctgggcggaccctccgtgtttctgttcccccccaagcccaaggacaccctgatgatcagccggacccccgaggtcacctgcgtggtggtggacgtcagccacgaggacccagaggtcaagttcaattggtatgtggacggcgtggaggtgcacaacgccaagaccaagccccgggaggaacagtacaacagcacctaccgggtggtgtccgtgctgaccgtgctgcaccaggactggctgaacggcaaagaatacaagtgcaaggtgtccaacaaggccctgcctgcccccatcgagaaaaccatcagcaaggccaagggccagcccagagaaccccaggtgtacaccctgccccctagcagggaagagctgaccaagaaccaggtgtccctgacctgtctggtcaagggcttctaccccagcgatatcgccgtggagtgggagagcaacggccagcctgagaacaactacaagaccaccccccctgtgctggacagcgacggcagcttcttcctgtacagcaagctgaccgtggacaagagccggtggcagcagggcaacgtgtttagctgcagcgtgatgcacgaggccctgcacaaccactacacccagaagagcttaagcctgtcccctggcagttga

SEQ ID NO: 161 - protein, 734 aa, synthetic construct
  REGION 1..734: note = LS2397-2400 [(CTD_short_d)2-Fc]
GDEMGTNITNLCPFGEVFNATRFASVYAWNRKRISNCVADYSVLYNSASFSTFKCYGVSPTKLNDLCFTNVYADSFVIRGDEVRQIAPGQTGKIADYNYKLPDDFTGCVIAWNSNNLDSKVGGNYNYLYRLFRKSNLKPFERDISTEIYQAGSTPCNGVEGFNCYFPLQSYGFQPTNGVGYQPYRVVVLSFELLHAPATVCGPKKSTNLVKNKCVNFNFNGLTGTGVLTESNKKFLPFQQFGRDGSGGGGSGGGGSNITNLCPFGEVFNATRFASVYAWNRKRISNCVADYSVLYNSASFSTFKCYGVSPTKLNDLCFTNVYADSFVIRGDEVRQIAPGQTGKIADYNYKLPDDFTGCVIAWNSNNLDSKVGGNYNYLYRLFRKSNLKPFERDISTEIYQAGSTPCNGVEGFNCYFPLQSYGFQPTNGVGYQPYRVVVLSFELLHAPATVCGPKKSTNLVKNKCVNFNFNGLTGTGVLTESNKKFLPFQQFGRDGSGGGGDGGGGSGDKTHTCPPCPAPELLGGPSVFLFPPKPKDTLMISRTPEVTCVVVDVSHEDPEVKFNWYVDGVEVHNAKTKPREEQYNSTYRVVSVLTVLHQDWLNGKEYKCKVSNKALPAPIEKTISKAKGQPREPQVYTLPPSREELTKNQVSLTCLVKGFYPSDIAVEWESNGQPENNYKTTPPVLDSDGSFFLYSKLTVDKSRWQQGNVFSCSVMHEALHNHYTQKSLSLSPGS

SEQ ID NO: 162 - DNA, 2205 bp, synthetic construct
  misc_feature 1..2205: note = LS2397-2400 [(CTD_short_d)2-Fc]
  source 1..2205: mol_type = other DNA
ggcgatgagatgggtaccaatataaccaacttgtgcccatttggagaagtatttaatgccacaaggttcgcttccgtttatgcatggaaccgcaagcgaatttccaattgcgtggccgattactccgtactgtacaattccgctagcttctctactttcaaatgctatggcgtgtcacctactaagctcaatgatctgtgcttcacaaatgtttatgcagattcattcgttatcaggggggacgaggtgagacagatagctcccgggcaaacaggcaagattgccgactacaattataagctgccagatgattttaccggttgcgttatagcatggaattccaacaacctggacagcaaagtaggaggtaattacaattatctctatcgtctgtttaggaagagcaacctcaagcctttcgaacgggacatatcaacagagatatatcaagcaggttccactccctgtaacggcgttgagggatttaattgttatttcccactccaaagctatggttttcagccaactaacggcgtaggttaccaaccataccgtgtcgtcgttctgagtttcgagcttctccatgcccctgctaccgtatgtggtcccaaaaaatctaccaatctggttaaaaacaagtgtgtaaactttaactttaacgggctgaccggtactggggtactgactgagtctaataagaagttcctcccatttcagcaattcgggcgcgatggctccggtggcgggggaagcggcgggggtggcagtaatatcactaatctgtgcccctttggagaagtgttcaacgctacacggtttgcctccgtgtatgcatggaaccgaaaacgcatttctaattgcgtcgccgattatagtgtgttgtataatagcgcatccttctccacttttaaatgttacggagttagcccaaccaaactcaatgacctctgctttacaaacgtatatgccgatagttttgtaattaggggagatgaagtcagacaaatcgccccagggcaaactggaaaaatcgctgattacaactacaagctccctgacgattttacagggtgtgtgatagcttggaactctaacaacctcgacagtaaggtcggtggaaattataactatctgtaccgattgtttcgtaagtcaaacctgaaaccattcgaacgggatatttccactgagatttatcaggctggcagtacaccttgtaacggggtagagggattcaattgctactttccacttcagtcttacgggttccagcctacaaacggtgttggttaccagccctacagagttgtagttttgtcctttgaattgctccatgcccctgccaccgtctgtggacccaaaaaatcaactaaccttgtcaagaataagtgcgtgaacttcaacttcaatggtctcaccggcaccggggtacttacagagagtaacaaaaagttccttcccttccagcagtttgggcgagacggatccggcggcggcggtgacggtggtggcggctccggagacaagacccacacctgccccccttgtcctgcccctgagctgctgggcggaccctccgtgtttctgttcccccccaagcccaaggacaccctgatgatcagccggacccccgaggtcacctgcgtggtggtggacgtcagccacgaggacccagaggtcaagttcaattggtatgtggacggcgtggaggtgcacaacgccaagaccaagccccgggaggaacagtacaacagcacctaccgggtggtgtccgtgctgaccgtgctgcaccaggactggctgaacggcaaagaatacaagtgcaaggtgtccaacaaggccctgcctgcccccatcgagaaaaccatcagcaaggccaagggccagcccagagaaccccaggtgtacaccctgccccctagcagggaagagctgaccaagaaccaggtgtccctgacctgtctggtcaagggcttctaccccagcgatatcgccgtggagtgggagagcaacggccagcctgagaacaactacaagaccaccccccctgtgctggacagcgacggcagcttcttcctgtacagcaagctgaccgtggacaagagccggtggcagcagggcaacgtgtttagctgcagcgtgatgcacgaggccctgcacaaccactacacccagaagagcttaagcctgtcccctggcagttga

SEQ ID NO: 163 - protein, 672 aa, synthetic construct
  REGION 1..672: note = LS2401-2404 [(CTD_short_i)2-Fc]
GDEMGTNITNLCPFGEVFNATRFASVYAWNRKRISNCVADYSVLYNSASFSTFKCYGVSPTKLNDLCFTNVYADSFVIRGDEVRQIAPGQTGKIADYNYKLPDDFTGCVIAWNSNNLDSKVGGNYNYLYRLFRKSNLKPFERDISTEIYQAGSTPCNGVEGFNCYFPLQSYGFQPTNGVGYQPYRVVVLSFELLHAPATVCGPKKSTNLVKNKGSGGGGSGGGGSNITNLCPFGEVFNATRFASVYAWNRKRISNCVADYSVLYNSASFSTFKCYGVSPTKLNDLCFTNVYADSFVIRGDEVRQIAPGQTGKIADYNYKLPDDFTGCVIAWNSNNLDSKVGGNYNYLYRLFRKSNLKPFERDISTEIYQAGSTPCNGVEGFNCYFPLQSYGFQPTNGVGYQPYRVVVLSFELLHAPATVCGPKKSTNLVKNKGSGGGGDGGGGSGDKTHTCPPCPAPELLGGPSVFLFPPKPKDTLMISRTPEVTCVVVDVSHEDPEVKFNWYVDGVEVHNAKTKPREEQYNSTYRVVSVLTVLHQDWLNGKEYKCKVSNKALPAPIEKTISKAKGQPREPQVYTLPPSREELTKNQVSLTCLVKGFYPSDIAVEWESNGQPENNYKTTPPVLDSDGSFFLYSKLTVDKSRWQQGNVFSCSVMHEALHNHYTQKSLSLSPGS

SEQ ID NO: 164 - DNA, 2019 bp, synthetic construct
  misc_feature 1..2019: note = LS2401-2404 [(CTD_short_i)2-Fc]
  source 1..2019: mol_type = other DNA
ggcgatgagatgggtaccaatatcacaaacttgtgcccatttggggaggtcttcaatgccactcggtttgcatcagtatatgcatggaatcgtaaacggatatcaaattgcgttgctgactattcagtcctctataatagtgctagtttcagtacatttaaatgctacggagtatctcctactaagttgaatgacctttgcttcacaaatgtctatgctgacagttttgttattaggggtgacgaggtgcggcagattgcacccgggcaaacaggaaagatcgctgactacaattacaaacttcctgatgacttcactggttgtgtgattgcttggaattccaacaatctggattccaaagtgggtgggaattacaattacttgtatagattgtttagaaaatctaacctcaagccattcgaacgggatataagcacagaaatctatcaggctgggagcacaccttgtaacggcgtagaggggttcaattgctattttccacttcagtcatacggctttcaacccaccaatggggtgggataccagccatatcgagtggtcgtactctctttcgagctgcttcatgcccccgcaaccgtgtgtggtcccaaaaaaagcaccaatctcgtcaagaataagggatcaggggggggcggatcaggcggtggaggcagcaacataactaatctttgtccattcggtgaagtctttaatgcaacccgttttgcttctgtgtatgcatggaacaggaaaagaatatccaattgcgttgccgactatagcgtcctttacaattctgcctcctttagcacatttaagtgttatggggtctcccccactaagctgaatgatctgtgtttcaccaacgtttatgcagactcctttgttatacggggggatgaagttcgacaaatagcacccgggcagacagggaagatcgctgactacaattacaagcttccagatgacttcactgggtgcgtaatcgcctggaacagtaacaacttggactctaaagtcggagggaattataattacctttatcgtctcttccgcaaaagtaacttgaagccttttgagagggacatttccacagagatatatcaagcaggttccacaccatgcaacggcgtcgagggatttaattgttatttccccctccaatcatacggctttcagccaactaacggcgttggctaccaaccatacagagtcgtagtgctttcctttgaactgctgcacgcccctgccactgtgtgtggcccaaaaaagagcaccaatttggtaaagaacaagggatccggcggcggcggtgacggtggtggcggctccggagacaagacccacacctgccccccttgtcctgcccctgagctgctgggcggaccctccgtgtttctgttcccccccaagcccaaggacaccctgatgatcagccggacccccgaggtcacctgcgtggtggtggacgtcagccacgaggacccagaggtcaagttcaattggtatgtggacggcgtggaggtgcacaacgccaagaccaagccccgggaggaacagtacaacagcacctaccgggtggtgtccgtgctgaccgtgctgcaccaggactggctgaacggcaaagaatacaagtgcaaggtgtccaacaaggccctgcctgcccccatcgagaaaaccatcagcaaggccaagggccagcccagagaaccccaggtgtacaccctgccccctagcagggaagagctgaccaagaaccaggtgtccctgacctgtctggtcaagggcttctaccccagcgatatcgccgtggagtgggagagcaacggccagcctgagaacaactacaagaccaccccccctgtgctggacagcgacggcagcttcttcctgtacagcaagctgaccgtggacaagagccggtggcagcagggcaacgtgtttagctgcagcgtgatgcacgaggccctgcacaaccactacacccagaagagcttaagcctgtcccctggcagttga

SEQ ID NO: 165 - protein, 672 aa, synthetic construct
  REGION 1..672: note = LS2421 and LS2422 [(CTD_short_i)2-Fc; D2 mutations for 501.V2 variant, K417N, E484K, N501Y]
GDEMGTNITNLCPFGEVFNATRFASVYAWNRKRISNCVADYSVLYNSASFSTFKCYGVSPTKLNDLCFTNVYADSFVIRGDEVRQIAPGQTGKIADYNYKLPDDFTGCVIAWNSNNLDSKVGGNYNYLYRLFRKSNLKPFERDISTEIYQAGSTPCNGVEGFNCYFPLQSYGFQPTNGVGYQPYRVVVLSFELLHAPATVCGPKKSTNLVKNKGSGGGGSGGGGSNITNLCPFGEVFNATRFASVYAWNRKRISNCVADYSVLYNSASFSTFKCYGVSPTKLNDLCFTNVYADSFVIRGDEVRQIAPGQTGNIADYNYKLPDDFTGCVIAWNSNNLDSKVGGNYNYLYRLFRKSNLKPFERDISTEIYQAGSTPCNGVKGFNCYFPLQSYGFQPTYGVGYQPYRVVVLSFELLHAPATVCGPKKSTNLVKNKGSGGGGDGGGGSGDKTHTCPPCPAPELLGGPSVFLFPPKPKDTLMISRTPEVTCVVVDVSHEDPEVKFNWYVDGVEVHNAKTKPREEQYNSTYRVVSVLTVLHQDWLNGKEYKCKVSNKALPAPIEKTISKAKGQPREPQVYTLPPSREELTKNQVSLTCLVKGFYPSDIAVEWESNGQPENNYKTTPPVLDSDGSFFLYSKLTVDKSRWQQGNVFSCSVMHEALHNHYTQKSLSLSPGS

SEQ ID NO: 166 - DNA, 2019 bp, synthetic construct
  misc_feature 1..2019: note = LS2421 and LS2422 [(CTD_short_i)2-Fc; D2 mutations for 501.V2 variant, K417N, E484K, N501Y]
  source 1..2019: mol_type = other DNA
ggcgatgagatgggtaccaatatcacaaacttgtgcccatttggggaggtcttcaatgccactcggtttgcatcagtatatgcatggaatcgtaaacggatatcaaattgcgttgctgactattcagtcctctataatagtgctagtttcagtacatttaaatgctacggagtatctcctactaagttgaatgacctttgcttcacaaatgtctatgctgacagttttgttattaggggtgacgaggtgcggcagattgcacccgggcaaacaggaaagatcgctgactacaattacaaacttcctgatgacttcactggttgtgtgattgcttggaattccaacaatctggattccaaagtgggtgggaattacaattacttgtatagattgtttagaaaatctaacctcaagccattcgaacgggatataagcacagaaatctatcaggctgggagcacaccttgtaacggcgtagaggggttcaattgctattttccacttcagtcatacggctttcaacccaccaatggggtgggataccagccatatcgagtggtcgtactctctttcgagctgcttcatgcccccgcaaccgtgtgtggtcccaaaaaaagcaccaatctcgtcaagaataagggatcaggggggggcggatcaggcggtggaggcagcaacataactaatctttgtccattcggtgaagtctttaatgcaacccgttttgcttctgtgtatgcatggaacaggaaaagaatatccaattgcgttgccgactatagcgtcctttacaattctgcctcctttagcacatttaagtgttatggggtctcccccactaagctgaatgatctgtgtttcaccaacgtttatgcagactcctttgttatacggggggatgaagttcgacaaatagcacccgggcagacagggaacatcgctgactacaattacaagcttccagatgacttcactgggtgcgtaatcgcctggaacagtaacaacttggactctaaagtcggagggaattataattacctttatcgtctcttccgcaaaagtaacttgaagccttttgagagggacatttccacagagatatatcaagcaggttccacaccatgcaacggcgtcaagggatttaattgttatttccccctccaatcatacggctttcagccaacttacggcgttggctaccaaccatacagagtcgtagtgctttcctttgaactgctgcacgcccctgccactgtgtgtggcccaaaaaagagcaccaatttggtaaagaacaagggatccggcggcggcggtgacggtggtggcggctccggagacaagacccacacctgccccccttgtcctgcccctgagctgctgggcggaccctccgtgtttctgttcccccccaagcccaaggacaccctgatgatcagccggacccccgaggtcacctgcgtggtggtggacgtcagccacgaggacccagaggtcaagttcaattggtatgtggacggcgtggaggtgcacaacgccaagaccaagccccgggaggaacagtacaacagcacctaccgggtggtgtccgtgctgaccgtgctgcaccaggactggctgaacggcaaagaatacaagtgcaaggtgtccaacaaggccctgcctgcccccatcgagaaaaccatcagcaaggccaagggccagcccagagaaccccaggtgtacaccctgccccctagcagggaagagctgaccaagaaccaggtgtccctgacctgtctggtcaagggcttctaccccagcgatatcgccgtggagtgggagagcaacggccagcctgagaacaactacaagaccaccccccctgtgctggacagcgacggcagcttcttcctgtacagcaagctgaccgtggacaagagccggtggcagcagggcaacgtgtttagctgcagcgtgatgcacgaggccctgcacaaccactacacccagaagagcttaagcctgtcccctggcagttga

SEQ ID NO: 167 - protein, 672 aa, synthetic construct
  REGION 1..672: note = LS2423 [(CTD_short_i)2-Fc; D2 mutations for hybrid P.1 and CAL.20C variants; K417T, L452R, E484K, N501Y]
GDEMGTNITNLCPFGEVFNATRFASVYAWNRKRISNCVADYSVLYNSASFSTFKCYGVSPTKLNDLCFTNVYADSFVIRGDEVRQIAPGQTGKIADYNYKLPDDFTGCVIAWNSNNLDSKVGGNYNYLYRLFRKSNLKPFERDISTEIYQAGSTPCNGVEGFNCYFPLQSYGFQPTNGVGYQPYRVVVLSFELLHAPATVCGPKKSTNLVKNKGSGGGGSGGGGSNITNLCPFGEVFNATRFASVYAWNRKRISNCVADYSVLYNSASFSTFKCYGVSPTKLNDLCFTNVYADSFVIRGDEVRQIAPGQTGTIADYNYKLPDDFTGCVIAWNSNNLDSKVGGNYNYRYRLFRKSNLKPFERDISTEIYQAGSTPCNGVKGFNCYFPLQSYGFQPTYGVGYQPYRVVVLSFELLHAPATVCGPKKSTNLVKNKGSGGGGDGGGGSGDKTHTCPPCPAPELLGGPSVFLFPPKPKDTLMISRTPEVTCVVVDVSHEDPEVKFNWYVDGVEVHNAKTKPREEQYNSTYRVVSVLTVLHQDWLNGKEYKCKVSNKALPAPIEKTISKAKGQPREPQVYTLPPSREELTKNQVSLTCLVKGFYPSDIAVEWESNGQPENNYKTTPPVLDSDGSFFLYSKLTVDKSRWQQGNVFSCSVMHEALHNHYTQKSLSLSPGS

SEQ ID NO: 168 - DNA, 2019 bp, synthetic construct
  misc_feature 1..2019: note = LS2423 [(CTD_short_i)2-Fc; D2 mutations for hybrid P.1 and CAL.20C variants; K417T, L452R, E484K, N501Y]
  source 1..2019: mol_type = other DNA
ggcgatgagatgggtaccaatatcacaaacttgtgcccatttggggaggtcttcaatgccactcggtttgcatcagtatatgcatggaatcgtaaacggatatcaaattgcgttgctgactattcagtcctctataatagtgctagtttcagtacatttaaatgctacggagtatctcctactaagttgaatgacctttgcttcacaaatgtctatgctgacagttttgttattaggggtgacgaggtgcggcagattgcacccgggcaaacaggaaagatcgctgactacaattacaaacttcctgatgacttcactggttgtgtgattgcttggaattccaacaatctggattccaaagtgggtgggaattacaattacttgtatagattgtttagaaaatctaacctcaagccattcgaacgggatataagcacagaaatctatcaggctgggagcacaccttgtaacggcgtagaggggttcaattgctattttccacttcagtcatacggctttcaacccaccaatggggtgggataccagccatatcgagtggtcgtactctctttcgagctgcttcatgcccccgcaaccgtgtgtggtcccaaaaaaagcaccaatctcgtcaagaataagggatcaggggggggcggatcaggcggtggaggcagcaacataactaatctttgtccattcggtgaagtctttaatgcaacccgttttgcttctgtgtatgcatggaacaggaaaagaatatccaattgcgttgccgactatagcgtcctttacaattctgcctcctttagcacatttaagtgttatggggtctcccccactaagctgaatgatctgtgtttcaccaacgtttatgcagactcctttgttatacggggggatgaagttcgacaaatagcacccgggcagacagggaccatcgctgactacaattacaagcttccagatgacttcactgggtgcgtaatcgcctggaacagtaacaacttggactctaaagtcggagggaattataattaccggtatcgtctcttccgcaaaagtaacttgaagccttttgagagggacatttccacagagatatatcaagcaggttccacaccatgcaacggcgtcaagggatttaattgttatttccccctccaatcatacggctttcagccaacttacggcgttggctaccaaccatacagagtcgtagtgctttcctttgaactgctgcacgcccctgccactgtgtgtggcccaaaaaagagcaccaatttggtaaagaacaagggatccggcggcggcggtgacggtggtggcggctccggagacaagacccacacctgccccccttgtcctgcccctgagctgctgggcggaccctccgtgtttctgttcccccccaagcccaaggacaccctgatgatcagccggacccccgaggtcacctgcgtggtggtggacgtcagccacgaggacccagaggtcaagttcaattggtatgtggacggcgtggaggtgcacaacgccaagaccaagccccgggaggaacagtacaacagcacctaccgggtggtgtccgtgctgaccgtgctgcaccaggactggctgaacggcaaagaatacaagtgcaaggtgtccaacaaggccctgcctgcccccatcgagaaaaccatcagcaaggccaagggccagcccagagaaccccaggtgtacaccctgccccctagcagggaagagctgaccaagaaccaggtgtccctgacctgtctggtcaagggcttctaccccagcgatatcgccgtggagtgggagagcaacggccagcctgagaacaactacaagaccaccccccctgtgctggacagcgacggcagcttcttcctgtacagcaagctgaccgtggacaagagccggtggcagcagggcaacgtgtttagctgcagcgtgatgcacgaggccctgcacaaccactacacccagaagagcttaagcctgtcccctggcagttga

SEQ ID NO: 169 - protein, 672 aa, synthetic construct
  REGION 1..672: note = LS2435 [(CTD_short_i)2-Fc; D1 and D2 mutations for hybrid P.1 and CAL.20C variants; K417T, L452R, E484K, N501Y]
GDEMGTNITNLCPFGEVFNATRFASVYAWNRKRISNCVADYSVLYNSASFSTFKCYGVSPTKLNDLCFTNVYADSFVIRGDEVRQIAPGQTGTIADYNYKLPDDFTGCVIAWNSNNLDSKVGGNYNYRYRLFRKSNLKPFERDISTEIYQAGSTPCNGVKGFNCYFPLQSYGFQPTYGVGYQPYRVVVLSFELLHAPATVCGPKKSTNLVKNKGSGGGGSGGGGSNITNLCPFGEVFNATRFASVYAWNRKRISNCVADYSVLYNSASFSTFKCYGVSPTKLNDLCFTNVYADSFVIRGDEVRQIAPGQTGTIADYNYKLPDDFTGCVIAWNSNNLDSKVGGNYNYRYRLFRKSNLKPFERDISTEIYQAGSTPCNGVKGFNCYFPLQSYGFQPTYGVGYQPYRVVVLSFELLHAPATVCGPKKSTNLVKNKGSGGGGDGGGGSGDKTHTCPPCPAPELLGGPSVFLFPPKPKDTLMISRTPEVTCVVVDVSHEDPEVKFNWYVDGVEVHNAKTKPREEQYNSTYRVVSVLTVLHQDWLNGKEYKCKVSNKALPAPIEKTISKAKGQPREPQVYTLPPSREELTKNQVSLTCLVKGFYPSDIAVEWESNGQPENNYKTTPPVLDSDGSFFLYSKLTVDKSRWQQGNVFSCSVMHEALHNHYTQKSLSLSPGS

SEQ ID NO: 170 - DNA, 2019 bp, synthetic construct
  misc_feature 1..2019: note = LS2435 [(CTD_short_i)2-Fc; D1 and D2 mutations for hybrid P.1 and CAL.20C variants; K417T, L452R, E484K, N501Y]
  source 1..2019: mol_type = other DNA
ggcgatgagatgggtaccaatatcacaaacttgtgcccatttggggaggtcttcaatgccactcggtttgcatcagtatatgcatggaatcgtaaacggatatcaaattgcgttgctgactattcagtcctctataatagtgctagtttcagtacatttaaatgctacggagtatctcctactaagttgaatgacctttgcttcacaaatgtctatgctgacagttttgttattaggggtgacgaggtgcggcagattgcacccgggcaaacaggaaccatcgctgactacaattacaaacttcctgatgacttcactggttgtgtgattgcttggaattccaacaatctggattccaaagtgggtgggaattacaattacagatatagattgtttagaaaatctaacctcaagccattcgaacgggatataagcacagaaatctatcaggctgggagcacaccttgtaacggcgtaaaggggttcaattgctattttccacttcagtcatacggctttcaacccacctatggggtgggataccagccatatcgagtggtcgtactctctttcgagctgcttcatgcccccgcaaccgtgtgtggtcccaaaaaaagcaccaatctcgtcaagaataagggatcaggggggggcggatcaggcggtggaggcagcaacataactaatctttgtccattcggtgaagtctttaatgcaacccgttttgcttctgtgtatgcatggaacaggaaaagaatatccaattgcgttgccgactatagcgtcctttacaattctgcctcctttagcacatttaagtgttatggggtctcccccactaagctgaatgatctgtgtttcaccaacgtttatgcagactcctttgttatacggggggatgaagttcgacaaatagcacccgggcagacagggaccatcgctgactacaattacaagcttccagatgacttcactgggtgcgtaatcgcctggaacagtaacaacttggactctaaagtcggagggaattataattaccggtatcgtctcttccgcaaaagtaacttgaagccttttgagagggacatttccacagagatatatcaagcaggttccacaccatgcaacggcgtcaagggatttaattgttatttccccctccaatcatacggctttcagccaacttacggcgttggctaccaaccatacagagtcgtagtgctttcctttgaactgctgcacgcccctgccactgtgtgtggcccaaaaaagagcaccaatttggtaaagaacaagggatccggcggcggcggtgacggtggtggcggctccggagacaagacccacacctgccccccttgtcctgcccctgagctgctgggcggaccctccgtgtttctgttcccccccaagcccaaggacaccctgatgatcagccggacccccgaggtcacctgcgtggtggtggacgtcagccacgaggacccagaggtcaagttcaattggtatgtggacggcgtggaggtgcacaacgccaagaccaagccccgggaggaacagtacaacagcacctaccgggtggtgtccgtgctgaccgtgctgcaccaggactggctgaacggcaaagaatacaagtgcaaggtgtccaacaaggccctgcctgcccccatcgagaaaaccatcagcaaggccaagggccagcccagagaaccccaggtgtacaccctgccccctagcagggaagagctgaccaagaaccaggtgtccctgacctgtctggtcaagggcttctaccccagcgatatcgccgtggagtgggagagcaacggccagcctgagaacaactacaagaccaccccccctgtgctggacagcgacggcagcttcttcctgtacagcaagctgaccgtggacaagagccggtggcagcagggcaacgtgtttagctgcagcgtgatgcacgaggccctgcacaaccactacacccagaagagcttaagcctgtcccctggcagttga

SEQ ID NO: 171 - protein, 76 aa, synthetic construct; identical to SEQ ID NO: 59
  REGION 1..76: note = RBD-tight

SEQ ID NO: 172 - DNA, 228 bp, synthetic construct
  misc_feature 1..228: note = RBD-tight
  source 1..228: mol_type = other DNA
atcgcatggaacagcaacaacctggatagcaaagtgggcggcaactataattacctgtatcgactcttcagaaagagtaatctgaagcctttcgaaagggatatcagtactgaaatatatcaggctggcagtactccttgcaatggagtagagggctttaactgttatttcccacttcagtcatacggttttcagcccaccaacggagtcggctatcagccttacaga

SEQ ID NO: 173 - protein, 158 aa, synthetic construct
  REGION 1..158: note = (RBD-tight)2
IAWNSNNLDSKVGGNYNYLYRLFRKSNLKPFERDISTEIYQAGSTPCNGVEGFNCYFPLQSYGFQPTNGVGYQPYRSGGGGSIAWNSNNLDSKVGGNYNYLYRLFRKSNLKPFERDISTEIYQAGSTPCNGVEGFNCYFPLQSYGFQPTNGVGYQPYR

SEQ ID NO: 174 - DNA, 474 bp, synthetic construct
  misc_feature 1..474: note = (RBD-tight)2
  source 1..474: mol_type = other DNA
atcgcatggaacagcaacaacctggatagcaaagtgggcggcaactataattacctgtatcgactcttcagaaagagtaatctgaagcctttcgaaagggatatcagtactgaaatatatcaggctggcagtactccttgcaatggagtagagggctttaactgttatttcccacttcagtcatacggttttcagcccaccaacggagtcggctatcagccttacagatcagggggcggaggaagtatcgcatggaactccaataatctcgacagcaaagtcggaggcaattacaattatctgtataggctcttcagaaaaagtaacctcaagccgttcgaacgggatatcagcactgagatataccaagccgggagtacaccctgtaacggagtcgagggctttaactgttacttccctctacagtcctatggctttcagcccaccaatggcgttgggtatcagccttataga

SEQ ID NO: 175 - protein, 90 aa, synthetic construct
  REGION 1..90: note = RBD-extended
IAWNSNNLDSKVGGNYNYLYRLFRKSNLKPFERDISTEIYQAGSTPCNGVEGFNCYFPLQSYGFQPTNGVGYQPYRVVVLSFELLHAPAT

SEQ ID NO: 176 - DNA, 270 bp, synthetic construct
  misc_feature 1..270: note = RBD-extended
  source 1..270: mol_type = other DNA
attgcatggaattcaaacaacctggattccaaggtcggtggtaattacaactatctatacagactgttccgaaagagcaacttgaaaccctttgaacgtgatatctccacagaaatttatcaggccggttccaccccttgcaacggcgttgagggttttaactgctattttccgctgcagagctacggttttcagccaactaatggagttggatatcaaccttaccgggtggttgtgctatccttcgaattgctccatgctcctgctacc

SEQ ID NO: 177 - protein, 184 aa, synthetic construct
  REGION 1..184: note = (RBD-extended)2
IAWNSNNLDSKVGGNYNYLYRLFRKSNLKPFERDISTEIYQAGSTPCNGVEGFNCYFPLQSYGFQPTNGVGYQPYRVVVLSFELLHAPATGGGSIAWNSNNLDSKVGGNYNYLYRLFRKSNLKPFERDISTEIYQAGSTPCNGVEGFNCYFPLQSYGFQPTNGVGYQPYRVVVLSFELLHAPAT

SEQ ID NO: 178 - DNA, 552 bp, synthetic construct
  misc_feature 1..552: note = (RBD-extended)2
  source 1..552: mol_type = other DNA
attgcatggaattcaaacaacctggattccaaggtcggtggtaattacaactatctatacagactgttccgaaagagcaacttgaaaccctttgaacgtgatatctccacagaaatttatcaggccggttccaccccttgcaacggcgttgagggttttaactgctattttccgctgcagagctacggttttcagccaactaatggagttggatatcaaccttaccgggtggttgtgctatccttcgaattgctccatgctcctgctaccggtggcggcagcatcgcatggaacagcaataatttggatagtaaagtgggcgggaattataactacctgtaccggctgttcagaaagagcaatctgaaaccttttgagcgggacatttccactgagatctaccaggccggcagcaccccctgtaacggagtcgaaggattcaattgttacttcccacttcaaagctatggattccaacctacaaatggggtcggctatcaaccatatcgcgttgtggtcttgtcctttgagcttttgcatgcccctgccact

SEQ ID NO: 179 - protein, 77 aa, synthetic construct
  REGION 1..77: note = RBD
IAWNSNNLDSKVGGNYNYLYRLFRKSNLKPFERDISTEIYQAGSTPCNGVEGFNCYFPLQSYGFQPTNGVGYQPYRS

SEQ ID NO: 180 - DNA, 231 bp, synthetic construct
  misc_feature 1..231: note = RBD
  source 1..231: mol_type = other DNA
atcgcttggaactccaacaatctggactccaaagtgggcggaaattacaattatctgtatcgcctcttccgtaagtctaacctcaagccttttgagagagacatctccactgagatatatcaggccggatcaactccctgtaacggtgtagaagggttcaattgctatttcccactgcagagttacggttttcagcccactaatggcgttggataccaaccctacaggtca

SEQ ID NO: 181 - protein, 158 aa, synthetic construct; identical to SEQ ID NO: 173
  REGION 1..158: note = (RBD)2

SEQ ID NO: 182 - DNA, 474 bp, synthetic construct
  misc_feature 1..474: note = (RBD)2
  source 1..474: mol_type = other DNA
atcgcttggaactccaacaatctggactccaaagtgggcggaaattacaattatctgtatcgcctcttccgtaagtctaacctcaagccttttgagagagacatctccactgagatatatcaggccggatcaactccctgtaacggtgtagaagggttcaattgctatttcccactgcagagttacggttttcagcccactaatggcgttggataccaaccctacaggtcaggaggcgggggatctattgcctggaactcaaataatctcgattctaaggttggcggtaactataattatctctatcggctgttccgcaaatccaaccttaaaccctttgagcgtgatataagtactgagatttaccaagcagggagcaccccctgcaatggcgtggaagggttcaactgctacttccccctccaaagctatggatttcagccaactaacggcgttggttaccagccctataga

SEQ ID NO: 183 - protein, 488 aa, synthetic construct
  REGION 1..488: note = (CTD_short_d)2
NITNLCPFGEVFNATRFASVYAWNRKRISNCVADYSVLYNSASFSTFKCYGVSPTKLNDLCFTNVYADSFVIRGDEVRQIAPGQTGKIADYNYKLPDDFTGCVIAWNSNNLDSKVGGNYNYLYRLFRKSNLKPFERDISTEIYQAGSTPCNGVEGFNCYFPLQSYGFQPTNGVGYQPYRVVVLSFELLHAPATVCGPKKSTNLVKNKCVNFNFNGLTGTGVLTESNKKFLPFQQFGRDGSGGGGSGGGGSNITNLCPFGEVFNATRFASVYAWNRKRISNCVADYSVLYNSASFSTFKCYGVSPTKLNDLCFTNVYADSFVIRGDEVRQIAPGQTGKIADYNYKLPDDFTGCVIAWNSNNLDSKVGGNYNYLYRLFRKSNLKPFERDISTEIYQAGSTPCNGVEGFNCYFPLQSYGFQPTNGVGYQPYRVVVLSFELLHAPATVCGPKKSTNLVKNKCVNFNFNGLTGTGVLTESNKKFLPFQQFGRD

SEQ ID NO: 184 - DNA, 1464 bp, synthetic construct
  misc_feature 1..1464: note = (CTD_short_d)2
  source 1..1464: mol_type = other DNA
aatataaccaacttgtgcccatttggagaagtatttaatgccacaaggttcgcttccgtttatgcatggaaccgcaagcgaatttccaattgcgtggccgattactccgtactgtacaattccgctagcttctctactttcaaatgctatggcgtgtcacctactaagctcaatgatctgtgcttcacaaatgtttatgcagattcattcgttatcaggggggacgaggtgagacagatagctcccgggcaaacaggcaagattgccgactacaattataagctgccagatgattttaccggttgcgttatagcatggaattccaacaacctggacagcaaagtaggaggtaattacaattatctctatcgtctgtttaggaagagcaacctcaagcctttcgaacgggacatatcaacagagatatatcaagcaggttccactccctgtaacggcgttgagggatttaattgttatttcccactccaaagctatggttttcagccaactaacggcgtaggttaccaaccataccgtgtcgtcgttctgagtttcgagcttctccatgcccctgctaccgtatgtggtcccaaaaaatctaccaatctggttaaaaacaagtgtgtaaactttaactttaacgggctgaccggtactggggtactgactgagtctaataagaagttcctcccatttcagcaattcgggcgcgatggctccggtggcgggggaagcggcgggggtggcagtaatatcactaatctgtgcccctttggagaagtgttcaacgctacacggtttgcctccgtgtatgcatggaaccgaaaacgcatttctaattgcgtcgccgattatagtgtgttgtataatagcgcatccttctccacttttaaatgttacggagttagcccaaccaaactcaatgacctctgctttacaaacgtatatgccgatagttttgtaattaggggagatgaagtcagacaaatcgccccagggcaaactggaaaaatcgctgattacaactacaagctccctgacgattttacagggtgtgtgatagcttggaactctaacaacctcgacagtaaggtcggtggaaattataactatctgtaccgattgtttcgtaagtcaaacctgaaaccattcgaacgggatatttccactgagatttatcaggctggcagtacaccttgtaacggggtagagggattcaattgctactttccacttcagtcttacgggttccagcctacaaacggtgttggttaccagccctacagagttgtagttttgtcctttgaattgctccatgcccctgccaccgtctgtggacccaaaaaatcaactaaccttgtcaagaataagtgcgtgaacttcaacttcaatggtctcaccggcaccggggtacttacagagagtaacaaaaagttccttcccttccagcagtttgggcgagac

SEQ ID NO: 185 - protein, 426 aa, synthetic construct
  REGION 1..426: note = (CTD_short_i)2
NITNLCPFGEVFNATRFASVYAWNRKRISNCVADYSVLYNSASFSTFKCYGVSPTKLNDLCFTNVYADSFVIRGDEVRQIAPGQTGKIADYNYKLPDDFTGCVIAWNSNNLDSKVGGNYNYLYRLFRKSNLKPFERDISTEIYQAGSTPCNGVEGFNCYFPLQSYGFQPTNGVGYQPYRVVVLSFELLHAPATVCGPKKSTNLVKNKGSGGGGSGGGGSNITNLCPFGEVFNATRFASVYAWNRKRISNCVADYSVLYNSASFSTFKCYGVSPTKLNDLCFTNVYADSFVIRGDEVRQIAPGQTGKIADYNYKLPDDFTGCVIAWNSNNLDSKVGGNYNYLYRLFRKSNLKPFERDISTEIYQAGSTPCNGVEGFNCYFPLQSYGFQPTNGVGYQPYRVVVLSFELLHAPATVCGPKKSTNLVKNK

SEQ ID NO: 186 - DNA, 1278 bp, synthetic construct
  misc_feature 1..1278: note = (CTD_short_i)2
  source 1..1278: mol_type = other DNA
aatatcacaaacttgtgcccatttggggaggtcttcaatgccactcggtttgcatcagtatatgcatggaatcgtaaacggatatcaaattgcgttgctgactattcagtcctctataatagtgctagtttcagtacatttaaatgctacggagtatctcctactaagttgaatgacctttgcttcacaaatgtctatgctgacagttttgttattaggggtgacgaggtgcggcagattgcacccgggcaaacaggaaagatcgctgactacaattacaaacttcctgatgacttcactggttgtgtgattgcttggaattccaacaatctggattccaaagtgggtgggaattacaattacttgtatagattgtttagaaaatctaacctcaagccattcgaacgggatataagcacagaaatctatcaggctgggagcacaccttgtaacggcgtagaggggttcaattgctattttccacttcagtcatacggctttcaacccaccaatggggtgggataccagccatatcgagtggtcgtactctctttcgagctgcttcatgcccccgcaaccgtgtgtggtcccaaaaaaagcaccaatctcgtcaagaataagggatcaggggggggcggatcaggcggtggaggcagcaacataactaatctttgtccattcggtgaagtctttaatgcaacccgttttgcttctgtgtatgcatggaacaggaaaagaatatccaattgcgttgccgactatagcgtcctttacaattctgcctcctttagcacatttaagtgttatggggtctcccccactaagctgaatgatctgtgtttcaccaacgtttatgcagactcctttgttatacggggggatgaagttcgacaaatagcacccgggcagacagggaagatcgctgactacaattacaagcttccagatgacttcactgggtgcgtaatcgcctggaacagtaacaacttggactctaaagtcggagggaattataattacctttatcgtctcttccgcaaaagtaacttgaagccttttgagagggacatttccacagagatatatcaagcaggttccacaccatgcaacggcgtcgagggatttaattgttatttccccctccaatcatacggctttcagccaactaacggcgttggctaccaaccatacagagtcgtagtgctttcctttgaactgctgcacgcccctgccactgtgtgtggcccaaaaaagagcaccaatttggtaaagaacaag

SEQ ID NO: 187 - protein, 427 aa, synthetic construct
  REGION 1..427: note = (CTD_short_i)2 [D2 mutations for 501.V2 variant, K417N, E484K, N501Y - mod. 1]
NITNLCPFGEVFNATRFASVYAWNRKRISNCVADYSVLYNSASFSTFKCYGVSPTKLNDLCFTNVYADSFVIRGDEVRQIAPGQTGKIADYNYKLPDDFTGCVIAWNSNNLDSKVGGNYNYLYRLFRKSNLKPFERDISTEIYQAGSTPCNGVEGFNCYFPLQSYGFQPTNGVGYQPYRVVVLSFELLHAPATVCGPKKSTNLVKNKGSGGGGSGGGGSNITNLCPFGEVFNATRFASVYAWNRKRISNCVADYSVLYNSASFSTFKCYGVSPTKLNDLCFTNVYADSFVIRGDEVRQIAPGQTGNNIADYNYKLPDDFTGCVIAWNSNNLDSKVGGNYNYLYRLFRKSNLKPFERDISTEIYQAGSTPCNGVKGFNCYFPLQSYGFQPTYGVGYQPYRVVVLSFELLHAPATVCGPKKSTNLVKNK

SEQ ID NO: 188 - DNA, 1278 bp, synthetic construct
  misc_feature 1..1278: note = (CTD_short_i)2 [D2 mutations for 501.V2 variant, K417N, E484K, N501Y - mod. 1]
  source 1..1278: mol_type = other DNA
aatatcacaaacttgtgcccatttggggaggtcttcaatgccactcggtttgcatcagtatatgcatggaatcgtaaacggatatcaaattgcgttgctgactattcagtcctctataatagtgctagtttcagtacatttaaatgctacggagtatctcctactaagttgaatgacctttgcttcacaaatgtctatgctgacagttttgttattaggggtgacgaggtgcggcagattgcacccgggcaaacaggaaagatcgctgactacaattacaaacttcctgatgacttcactggttgtgtgattgcttggaattccaacaatctggattccaaagtgggtgggaattacaattacttgtatagattgtttagaaaatctaacctcaagccattcgaacgggatataagcacagaaatctatcaggctgggagcacaccttgtaacggcgtagaggggttcaattgctattttccacttcagtcatacggctttcaacccaccaatggggtgggataccagccatatcgagtggtcgtactctctttcgagctgcttcatgcccccgcaaccgtgtgtggtcccaaaaaaagcaccaatctcgtcaagaataagggatcaggggggggcggatcaggcggtggaggcagcaacataactaatctttgtccattcggtgaagtctttaatgcaacccgttttgcttctgtgtatgcatggaacaggaaaagaatatccaattgcgttgccgactatagcgtcctttacaattctgcctcctttagcacatttaagtgttatggggtctcccccactaagctgaatgatctgtgtttcaccaacgtttatgcagactcctttgttatacggggggatgaagttcgacaaatagcacccgggcagacagggaacatcgctgactacaattacaagcttccagatgacttcactgggtgcgtaatcgcctggaacagtaacaacttggactctaaagtcggagggaattataattacctttatcgtctcttccgcaaaagtaacttgaagccttttgagagggacatttccacagagatatatcaagcaggttccacaccatgcaacggcgtcaagggatttaattgttatttccccctccaatcatacggctttcagccaacttacggcgttggctaccaaccatacagagtcgtagtgctttcctttgaactgctgcacgcccctgccactgtgtgtggcccaaaaaagagcaccaatttggtaaagaacaag

SEQ ID NO: 189 - protein, 426 aa, synthetic construct
  REGION 1..426: note = (CTD_short_i)2 [D2 mutations for hybrid P.1 and CAL.20C variants; K417T, L452R, E484K, N501Y - mod. 2]
NITNLCPFGEVFNATRFASVYAWNRKRISNCVADYSVLYNSASFSTFKCYGVSPTKLNDLCFTNVYADSFVIRGDEVRQIAPGQTGKIADYNYKLPDDFTGCVIAWNSNNLDSKVGGNYNYLYRLFRKSNLKPFERDISTEIYQAGSTPCNGVEGFNCYFPLQSYGFQPTNGVGYQPYRVVVLSFELLHAPATVCGPKKSTNLVKNKGSGGGGSGGGGSNITNLCPFGEVFNATRFASVYAWNRKRISNCVADYSVLYNSASFSTFKCYGVSPTKLNDLCFTNVYADSFVIRGDEVRQIAPGQTGTIADYNYKLPDDFTGCVIAWNSNNLDSKVGGNYNYRYRLFRKSNLKPFERDISTEIYQAGSTPCNGVKGFNCYFPLQSYGFQPTYGVGYQPYRVVVLSFELLHAPATVCGPKKSTNLVKNK

SEQ ID NO: 190 - DNA, 1278 bp, synthetic construct
  misc_feature 1..1278: note = (CTD_short_i)2 [D2 mutations for hybrid P.1 and CAL.20C variants; K417T, L452R, E484K, N501Y - mod. 2]
  source 1..1278: mol_type = other DNA
aatatcacaaacttgtgcccatttggggaggtcttcaatgccactcggtttgcatcagtatatgcatggaatcgtaaacggatatcaaattgcgttgctgactattcagtcctctataatagtgctagtttcagtacatttaaatgctacggagtatctcctactaagttgaatgacctttgcttcacaaatgtctatgctgacagttttgttattaggggtgacgaggtgcggcagattgcacccgggcaaacaggaaagatcgctgactacaattacaaacttcctgatgacttcactggttgtgtgattgcttggaattccaacaatctggattccaaagtgggtgggaattacaattacttgtatagattgtttagaaaatctaacctcaagccattcgaacgggatataagcacagaaatctatcaggctgggagcacaccttgtaacggcgtagaggggttcaattgctattttccacttcagtcatacggctttcaacccaccaatggggtgggataccagccatatcgagtggtcgtactctctttcgagctgcttcatgcccccgcaaccgtgtgtggtcccaaaaaaagcaccaatctcgtcaagaataagggatcaggggggggcggatcaggcggtggaggcagcaacataactaatctttgtccattcggtgaagtctttaatgcaacccgttttgcttctgtgtatgcatggaacaggaaaagaatatccaattgcgttgccgactatagcgtcctttacaattctgcctcctttagcacatttaagtgttatggggtctcccccactaagctgaatgatctgtgtttcaccaacgtttatgcagactcctttgttatacggggggatgaagttcgacaaatagcacccgggcagacagggaccatcgctgactacaattacaagcttccagatgacttcactgggtgcgtaatcgcctggaacagtaacaacttggactctaaagtcggagggaattataattaccggtatcgtctcttccgcaaaagtaacttgaagccttttgagagggacatttccacagagatatatcaagcaggttccacaccatgcaacggcgtcaagggatttaattgttatttccccctccaatcatacggctttcagccaacttacggcgttggctaccaaccatacagagtcgtagtgctttcctttgaactgctgcacgcccctgccactgtgtgtggcccaaaaaagagcaccaatttggtaaagaacaag

SEQ ID NO: 191 - protein, 426 aa, synthetic construct
  REGION 1..426: note = (CTD_short_i)2 [D1 and D2 mutations for hybrid P.1 and CAL.20C variants; K417T, L452R, E484K, N501Y- mod. 3]
NITNLCPFGEVFNATRFASVYAWNRKRISNCVADYSVLYNSASFSTFKCYGVSPTKLNDLCFTNVYADSFVIRGDEVRQIAPGQTGTIADYNYKLPDDFTGCVIAWNSNNLDSKVGGNYNYRYRLFRKSNLKPFERDISTEIYQAGSTPCNGVKGFNCYFPLQSYGFQPTYGVGYQPYRVVVLSFELLHAPATVCGPKKSTNLVKNKGSGGGGSGGGGSNITNLCPFGEVFNATRFASVYAWNRKRISNCVADYSVLYNSASFSTFKCYGVSPTKLNDLCFTNVYADSFVIRGDEVRQIAPGQTGTIADYNYKLPDDFTGCVIAWNSNNLDSKVGGNYNYRYRLFRKSNLKPFERDISTEIYQAGSTPCNGVKGFNCYFPLQSYGFQPTYGVGYQPYRVVVLSFELLHAPATVCGPKKSTNLVKNK

SEQ ID NO: 192 - DNA, 1278 bp, synthetic construct
  misc_feature 1..1278: note = (CTD_short_i)2 [D1 and D2 mutations for hybrid P.1 and CAL.20C variants; K417T, L452R, E484K, N501Y- mod. 3]
  source 1..1278: mol_type = other DNA
aatatcacaaacttgtgcccatttggggaggtcttcaatgccactcggtttgcatcagtatatgcatggaatcgtaaacggatatcaaattgcgttgctgactattcagtcctctataatagtgctagtttcagtacatttaaatgctacggagtatctcctactaagttgaatgacctttgcttcacaaatgtctatgctgacagttttgttattaggggtgacgaggtgcggcagattgcacccgggcaaacaggaaccatcgctgactacaattacaaacttcctgatgacttcactggttgtgtgattgcttggaattccaacaatctggattccaaagtgggtgggaattacaattacagatatagattgtttagaaaatctaacctcaagccattcgaacgggatataagcacagaaatctatcaggctgggagcacaccttgtaacggcgtaaaggggttcaattgctattttccacttcagtcatacggctttcaacccacctatggggtgggataccagccatatcgagtggtcgtactctctttcgagctgcttcatgcccccgcaaccgtgtgtggtcccaaaaaaagcaccaatctcgtcaagaataagggatcaggggggggcggatcaggcggtggaggcagcaacataactaatctttgtccattcggtgaagtctttaatgcaacccgttttgcttctgtgtatgcatggaacaggaaaagaatatccaattgcgttgccgactatagcgtcctttacaattctgcctcctttagcacatttaagtgttatggggtctcccccactaagctgaatgatctgtgtttcaccaacgtttatgcagactcctttgttatacggggggatgaagttcgacaaatagcacccgggcagacagggaccatcgctgactacaattacaagcttccagatgacttcactgggtgcgtaatcgcctggaacagtaacaacttggactctaaagtcggagggaattataattaccggtatcgtctcttccgcaaaagtaacttgaagccttttgagagggacatttccacagagatatatcaagcaggttccacaccatgcaacggcgtcaagggatttaattgttatttccccctccaatcatacggctttcagccaacttacggcgttggctaccaaccatacagagtcgtagtgctttcctttgaactgctgcacgcccctgccactgtgtgtggcccaaaaaagagcaccaatttggtaaagaacaag

SEQ ID NO: 193 - protein, 13 aa, synthetic construct
  REGION 1..13: note = Short
GSGGGGDGGGGSG

SEQ ID NO: 194 - DNA, 39 bp, synthetic construct; identical to SEQ ID NO: 66
  misc_feature 1..39: note = Short
  source 1..39: mol_type = other DNA

SEQ ID NO: 195 - protein, 25 aa, synthetic construct
  REGION 1..25: note = Medium
GSGGGGDSGGGGSGGGGSSGGGGSG

SEQ ID NO: 196 - DNA, 75 bp, synthetic construct
  misc_feature 1..75: note = Medium
  source 1..75: mol_type = other DNA
ggatccggcggcggcggtgactccgggggaggaggttccggcggcggaggatcgagcggtggtggcggctccgga

SEQ ID NO: 197 - protein, 32 aa, synthetic construct
  REGION 1..32: note = Long
GSGGGGDSGGGGSGGSGGSGGSGGGSGGGGSG

SEQ ID NO: 198 - DNA, 96 bp, synthetic construct
  misc_feature 1..96: note = Long
  source 1..96: mol_type = other DNA
ggatccggcggcggcggtgactccgggggcggaggttccggtggctctggtggctctggaggctcgggaggcggaagcggtggtggcggctccgga

SEQ ID NO: 199 - protein, 234 aa, synthetic construct
  REGION 1..234: note = SARS_short_h
RVVPSGDVVRFPNITNLCPFGEVFNATKFPSVYAWERKKISNCVADYSVLYNSTFFSTFKCYGVSATKLNDLCFSNVYADSFVVKGDDVRQIAPGQTGVIADYNYKLPDDFMGCVLAWNTRNIDATSTGNYNYKYRYLRHGKLRPFERDISNVPFSPDGKPCTPPALNCYWPLNDYGFYTTTGIGYQPYRVVVLSFELLNAPATVCGPKLSTDLIKNQCVNFNFNGLTGTGVLT

SEQ ID NO: 200 - DNA, 702 bp, synthetic construct
  misc_feature 1..702: note = SARS_short_h
  source 1..702: mol_type = other DNA
agggtagttccctcaggcgatgtagttagatttccaaacataaccaacttgtgccccttcggggaggtattcaacgccaccaagttccccagtgtatatgcctgggagcggaaaaagatttctaattgcgttgctgattatagcgtactgtacaatagtacatttttttcaaccttcaaatgctacggtgttagcgccactaagctcaatgacttgtgcttttcaaatgtgtacgctgacagctttgttgtaaaaggcgacgatgtccgacagatagcacctggacaaactggtgtgattgcagattacaattacaaattgcccgacgattttatggggtgtgtgctcgcatggaatacccggaacattgatgctacctcaacaggaaactataactacaagtatcgatacttgcgacacgggaaactgaggccatttgagcgtgacatatcaaatgtgccattttcccccgacggaaaaccatgtactcctcccgctctgaattgctactggcccctgaacgattacggattctatactactaccggcattggctatcaaccttacagggttgtagtccttagctttgagttgctcaacgctcctgcaaccgtatgtgggccaaagctctcaactgatctcatcaaaaatcagtgcgtcaattttaactttaatggcctgacaggtactggtgttcttact

SEQ ID NO: 201 - protein, 205 aa, synthetic construct
  REGION 1..205: note = SARS_short_i
NITNLCPFGEVFNATKFPSVYAWERKKISNCVADYSVLYNSTFFSTFKCYGVSATKLNDLCFSNVYADSFVVKGDDVRQIAPGQTGVIADYNYKLPDDFMGCVLAWNTRNIDATSTGNYNYKYRYLRHGKLRPFERDISNVPFSPDGKPCTPPALNCYWPLNDYGFYTTTGIGYQPYRVVVLSFELLNAPATVCGPKLSTDLIKN

SEQ ID NO: 202 - DNA, 615 bp, synthetic construct
  misc_feature 1..615: note = SARS_short_i
  source 1..615: mol_type = other DNA
aacataaccaacttgtgccccttcggggaggtattcaacgccaccaagttccccagtgtatatgcctgggagcggaaaaagatttctaattgcgttgctgattatagcgtactgtacaatagtacatttttttcaaccttcaaatgctacggtgttagcgccactaagctcaatgacttgtgcttttcaaatgtgtacgctgacagctttgttgtaaaaggcgacgatgtccgacagatagcacctggacaaactggtgtgattgcagattacaattacaaattgcccgacgattttatggggtgtgtgctcgcatggaatacccggaacattgatgctacctcaacaggaaactataactacaagtatcgatacttgcgacacgggaaactgaggccatttgagcgtgacatatcaaatgtgccattttcccccgacggaaaaccatgtactcctcccgctctgaattgctactggcccctgaacgattacggattctatactactaccggcattggctatcaaccttacagggttgtagtccttagctttgagttgctcaacgctcctgcaaccgtatgtgggccaaagctctcaactgatctcatcaaaaat

SEQ ID NO: 203 - protein, 232 aa, synthetic construct
  REGION 1..232: note = MERS_Lytic_a
SGSVVEQAEGVECDFSPLLSGTPPQVYNFKRLVFTNCNYNLTKLLSLFSVNDFTCSQISPAAIASNCYSSLILDYFSYPLSMKSDLSVSSAGPISQFNYKQSFSNPTCLILATVPHNLTTITKPLKYSYINKCSRLLSDDRTEVPQLVNANQYSPCVSIVPSTVWEDGDYYRKQLSPLEGGGWLVASGSTVAMTEQLQMGFGITVQYGTDTNSVCPKLEFANDTKIASQLGN

SEQ ID NO: 204 - DNA, 696 bp, synthetic construct
  misc_feature 1..696: note = MERS_Lytic_a
  source 1..696: mol_type = other DNA
tcagggtccgtagttgagcaggcagagggcgtagagtgcgacttctcccccttgctttccgggactccaccccaggtgtataattttaaaaggcttgtctttactaactgcaactacaacttgaccaaacttctgagtctgttttctgttaatgacttcacatgctctcaaatatcacctgccgctatcgctagtaactgttacagctctcttatcttggattatttctcttatcccctctctatgaaatctgatctcagtgtaagtagtgcaggacccatttcccagtttaattacaaacaatcattctcaaatccaacatgcttgatactggctactgtccctcataacctgaccacaatcactaaaccactcaagtattcatacatcaacaagtgttcccgcctcctgtcagacgatcgaacagaggtccctcagttggtaaacgctaatcaatattcaccatgcgtgagcattgtcccaagcaccgtctgggaagatggggattactataggaaacagttgtcacctcttgagggagggggctggttggtcgcatccggtagcacagtggctatgactgaacagctgcaaatgggtttcggcataaccgtgcagtatgggaccgatacaaactccgtgtgtccaaaattggaatttgctaacgacacaaaaatagcctcacagttgggtaat

SEQ ID NO: 205 - protein, 225 aa, synthetic construct
  REGION 1..225: note = MERS_Lytic_b
SGSVVEQAEGVECDFSPLLSGTPPQVYNFKRLVFTNCNYNLTKLLSLFSVNDFTCSQISPAAIASNCYSSLILDYFSYPLSMKSDLSVSSAGPISQFNYKQSFSNPTCLILATVPHNLTTITKPLKYSYINKCSRLLSDDRTEVPQLVNANQYSPCVSIVPSTVWEDGDYYRKQLSPLEGGGWLVASGSTVAMTEQLQMGFGITVQYGTDTNSVCPKLEFANDTK

SEQ ID NO: 206 - DNA, 675 bp, synthetic construct
  misc_feature 1..675: note = MERS_Lytic_b
  source 1..675: mol_type = other DNA
tcagggtccgtagttgagcaggcagagggcgtagagtgcgacttctcccccttgctttccgggactccaccccaggtgtataattttaaaaggcttgtctttactaactgcaactacaacttgaccaaacttctgagtctgttttctgttaatgacttcacatgctctcaaatatcacctgccgctatcgctagtaactgttacagctctcttatcttggattatttctcttatcccctctctatgaaatctgatctcagtgtaagtagtgcaggacccatttcccagtttaattacaaacaatcattctcaaatccaacatgcttgatactggctactgtccctcataacctgaccacaatcactaaaccactcaagtattcatacatcaacaagtgttcccgcctcctgtcagacgatcgaacagaggtccctcagttggtaaacgctaatcaatattcaccatgcgtgagcattgtcccaagcaccgtctgggaagatggggattactataggaaacagttgtcacctcttgagggagggggctggttggtcgcatccggtagcacagtggctatgactgaacagctgcaaatgggtttcggcataaccgtgcagtatgggaccgatacaaactccgtgtgtccaaaattggaatttgctaacgacacaaaa

SEQ ID NO: 207 - protein, 214 aa, synthetic construct
  REGION 1..214: note = MERS_Lytic_c
EQAEGVECDFSPLLSGTPPQVYNFKRLVFTNCNYNLTKLLSLFSVNDFTCSQISPAAIASNCYSSLILDYFSYPLSMKSDLSVSSAGPISQFNYKQSFSNPTCLILATVPHNLTTITKPLKYSYINKCSRLLSDDRTEVPQLVNANQYSPCVSIVPSTVWEDGDYYRKQLSPLEGGGWLVASGSTVAMTEQLQMGFGITVQYGTDTNSVCPKLE

SEQ ID NO: 208 - DNA, 642 bp, synthetic construct
  misc_feature 1..642: note = MERS_Lytic_c
  source 1..642: mol_type = other DNA
gagcaggcagagggcgtagagtgcgacttctcccccttgctttccgggactccaccccaggtgtataattttaaaaggcttgtctttactaactgcaactacaacttgaccaaacttctgagtctgttttctgttaatgacttcacatgctctcaaatatcacctgccgctatcgctagtaactgttacagctctcttatcttggattatttctcttatcccctctctatgaaatctgatctcagtgtaagtagtgcaggacccatttcccagtttaattacaaacaatcattctcaaatccaacatgcttgatactggctactgtccctcataacctgaccacaatcactaaaccactcaagtattcatacatcaacaagtgttcccgcctcctgtcagacgatcgaacagaggtccctcagttggtaaacgctaatcaatattcaccatgcgtgagcattgtcccaagcaccgtctgggaagatggggattactataggaaacagttgtcacctcttgagggagggggctggttggtcgcatccggtagcacagtggctatgactgaacagctgcaaatgggtttcggcataaccgtgcagtatgggaccgatacaaactccgtgtgtccaaaattggaa

SEQ ID NO: 209 - protein, 209 aa, synthetic construct
  REGION 1..209: note = MERS_Lytic_d
EGVECDFSPLLSGTPPQVYNFKRLVFTNCNYNLTKLLSLFSVNDFTCSQISPAAIASNCYSSLILDYFSYPLSMKSDLSVSSAGPISQFNYKQSFSNPTCLILATVPHNLTTITKPLKYSYINKCSRLLSDDRTEVPQLVNANQYSPCVSIVPSTVWEDGDYYRKQLSPLEGGGWLVASGSTVAMTEQLQMGFGITVQYGTDTNSVCPK

SEQ ID NO: 210 - DNA, 627 bp, synthetic construct
  misc_feature 1..627: note = MERS_Lytic_d
  source 1..627: mol_type = other DNA
gagggcgtagagtgcgacttctcccccttgctttccgggactccaccccaggtgtataattttaaaaggcttgtctttactaactgcaactacaacttgaccaaacttctgagtctgttttctgttaatgacttcacatgctctcaaatatcacctgccgctatcgctagtaactgttacagctctcttatcttggattatttctcttatcccctctctatgaaatctgatctcagtgtaagtagtgcaggacccatttcccagtttaattacaaacaatcattctcaaatccaacatgcttgatactggctactgtccctcataacctgaccacaatcactaaaccactcaagtattcatacatcaacaagtgttcccgcctcctgtcagacgatcgaacagaggtccctcagttggtaaacgctaatcaatattcaccatgcgtgagcattgtcccaagcaccgtctgggaagatggggattactataggaaacagttgtcacctcttgagggagggggctggttggtcgcatccggtagcacagtggctatgactgaacagctgcaaatgggtttcggcataaccgtgcagtatgggaccgatacaaactccgtgtgtccaaaa

SEQ ID NO: 211 - protein, 219 aa, synthetic construct
  REGION 1..219: note = MERS_Lytic_e
SGSVVEQAEGVECDFSPLLSGTPPQVYNFKRLVFTNCNYNLTKLLSLFSVNDFTCSQISPAAIASNCYSSLILDYFSYPLSMKSDLSVSSAGPISQFNYKQSFSNPTCLILATVPHNLTTITKPLKYSYINKCSRLLSDDRTEVPQLVNANQYSPCVSIVPSTVWEDGDYYRKQLSPLEGGGWLVASGSTVAMTEQLQMGFGITVQYGTDTNSVCPKLE

SEQ ID NO: 212 - DNA, 657 bp, synthetic construct
  misc_feature 1..657: note = MERS_Lytic_e
  source 1..657: mol_type = other DNA
tcagggtccgtagttgagcaggcagagggcgtagagtgcgacttctcccccttgctttccgggactccaccccaggtgtataattttaaaaggcttgtctttactaactgcaactacaacttgaccaaacttctgagtctgttttctgttaatgacttcacatgctctcaaatatcacctgccgctatcgctagtaactgttacagctctcttatcttggattatttctcttatcccctctctatgaaatctgatctcagtgtaagtagtgcaggacccatttcccagtttaattacaaacaatcattctcaaatccaacatgcttgatactggctactgtccctcataacctgaccacaatcactaaaccactcaagtattcatacatcaacaagtgttcccgcctcctgtcagacgatcgaacagaggtccctcagttggtaaacgctaatcaatattcaccatgcgtgagcattgtcccaagcaccgtctgggaagatggggattactataggaaacagttgtcacctcttgagggagggggctggttggtcgcatccggtagcacagtggctatgactgaacagctgcaaatgggtttcggcataaccgtgcagtatgggaccgatacaaactccgtgtgtccaaaattggaa

SEQ ID NO: 213 - protein, 220 aa, synthetic construct
  REGION 1..220: note = MERS_Lytic_f
EQAEGVECDFSPLLSGTPPQVYNFKRLVFTNCNYNLTKLLSLFSVNDFTCSQISPAAIASNCYSSLILDYFSYPLSMKSDLSVSSAGPISQFNYKQSFSNPTCLILATVPHNLTTITKPLKYSYINKCSRLLSDDRTEVPQLVNANQYSPCVSIVPSTVWEDGDYYRKQLSPLEGGGWLVASGSTVAMTEQLQMGFGITVQYGTDTNSVCPKLEFANDTK

SEQ ID NO: 214 - DNA, 660 bp, synthetic construct
  misc_feature 1..660: note = MERS_Lytic_f
  source 1..660: mol_type = other DNA
gagcaggcagagggcgtagagtgcgacttctcccccttgctttccgggactccaccccaggtgtataattttaaaaggcttgtctttactaactgcaactacaacttgaccaaacttctgagtctgttttctgttaatgacttcacatgctctcaaatatcacctgccgctatcgctagtaactgttacagctctcttatcttggattatttctcttatcccctctctatgaaatctgatctcagtgtaagtagtgcaggacccatttcccagtttaattacaaacaatcattctcaaatccaacatgcttgatactggctactgtccctcataacctgaccacaatcactaaaccactcaagtattcatacatcaacaagtgttcccgcctcctgtcagacgatcgaacagaggtccctcagttggtaaacgctaatcaatattcaccatgcgtgagcattgtcccaagcaccgtctgggaagatggggattactataggaaacagttgtcacctcttgagggagggggctggttggtcgcatccggtagcacagtggctatgactgaacagctgcaaatgggtttcggcataaccgtgcagtatgggaccgatacaaactccgtgtgtccaaaattggaatttgctaacgacacaaaa

SEQ ID NO: 215 - protein, 217 aa, synthetic construct
  REGION 1..217: note = MERS_Lytic_g
EGVECDFSPLLSGTPPQVYNFKRLVFTNCNYNLTKLLSLFSVNDFTCSQISPAAIASNCYSSLILDYFSYPLSMKSDLSVSSAGPISQFNYKQSFSNPTCLILATVPHNLTTITKPLKYSYINKCSRLLSDDRTEVPQLVNANQYSPCVSIVPSTVWEDGDYYRKQLSPLEGGGWLVASGSTVAMTEQLQMGFGITVQYGTDTNSVCPKLEFANDTK

SEQ ID NO: 216 - DNA, 651 bp, synthetic construct
  misc_feature 1..651: note = MERS_Lytic_g
  source 1..651: mol_type = other DNA
gagggcgtagagtgcgacttctcccccttgctttccgggactccaccccaggtgtataattttaaaaggcttgtctttactaactgcaactacaacttgaccaaacttctgagtctgttttctgttaatgacttcacatgctctcaaatatcacctgccgctatcgctagtaactgttacagctctcttatcttggattatttctcttatcccctctctatgaaatctgatctcagtgtaagtagtgcaggacccatttcccagtttaattacaaacaatcattctcaaatccaacatgcttgatactggctactgtccctcataacctgaccacaatcactaaaccactcaagtattcatacatcaacaagtgttcccgcctcctgtcagacgatcgaacagaggtccctcagttggtaaacgctaatcaatattcaccatgcgtgagcattgtcccaagcaccgtctgggaagatggggattactataggaaacagttgtcacctcttgagggagggggctggttggtcgcatccggtagcacagtggctatgactgaacagctgcaaatgggtttcggcataaccgtgcagtatgggaccgatacaaactccgtgtgtccaaaattggaatttgctaacgacacaaaa

SEQ ID NO: 217 - protein, 699 aa, synthetic construct
  REGION 1..699: note = Ma_l1_Sh_l2_S2
SGSVVEQAEGVECDFSPLLSGTPPQVYNFKRLVFTNCNYNLTKLLSLFSVNDFTCSQISPAAIASNCYSSLILDYFSYPLSMKSDLSVSSAGPISQFNYKQSFSNPTCLILATVPHNLTTITKPLKYSYINKCSRLLSDDRTEVPQLVNANQYSPCVSIVPSTVWEDGDYYRKQLSPLEGGGWLVASGSTVAMTEQLQMGFGITVQYGTDTNSVCPKLEFANDTKIASQLGNSGGGSGGGSGGGSRVVPSGDVVRFPNITNLCPFGEVFNATKFPSVYAWERKKISNCVADYSVLYNSTFFSTFKCYGVSATKLNDLCFSNVYADSFVVKGDDVRQIAPGQTGVIADYNYKLPDDFMGCVLAWNTRNIDATSTGNYNYKYRYLRHGKLRPFERDISNVPFSPDGKPCTPPALNCYWPLNDYGFYTTTGIGYQPYRVVVLSFELLNAPATVCGPKLSTDLIKNQCVNFNFNGLTGTGVLTSGGSGGSGGSGGSNITNLCPFGEVFNATRFASVYAWNRKRISNCVADYSVLYNSASFSTFKCYGVSPTKLNDLCFTNVYADSFVIRGDEVRQIAPGQTGKIADYNYKLPDDFTGCVIAWNSNNLDSKVGGNYNYLYRLFRKSNLKPFERDISTEIYQAGSTPCNGVEGFNCYFPLQSYGFQPTNGVGYQPYRVVVLSFELLHAPATVCGPKKSTNLVKNK

SEQ ID NO: 218 - DNA, 2097 bp, synthetic construct
  misc_feature 1..2097: note = Ma_l1_Sh_l2_S2
  source 1..2097: mol_type = other DNA
tcagggtccgtagttgagcaggcagagggcgtagagtgcgacttctcccccttgctttccgggactccaccccaggtgtataattttaaaaggcttgtctttactaactgcaactacaacttgaccaaacttctgagtctgttttctgttaatgacttcacatgctctcaaatatcacctgccgctatcgctagtaactgttacagctctcttatcttggattatttctcttatcccctctctatgaaatctgatctcagtgtaagtagtgcaggacccatttcccagtttaattacaaacaatcattctcaaatccaacatgcttgatactggctactgtccctcataacctgaccacaatcactaaaccactcaagtattcatacatcaacaagtgttcccgcctcctgtcagacgatcgaacagaggtccctcagttggtaaacgctaatcaatattcaccatgcgtgagcattgtcccaagcaccgtctgggaagatggggattactataggaaacagttgtcacctcttgagggagggggctggttggtcgcatccggtagcacagtggctatgactgaacagctgcaaatgggtttcggcataaccgtgcagtatgggaccgatacaaactccgtgtgtccaaaattggaatttgctaacgacacaaaaatagcctcacagttgggtaattctgggggaggaagtggagggggtagtggtggaggaagtagggtagttccctcaggcgatgtagttagatttccaaacataaccaacttgtgccccttcggggaggtattcaacgccaccaagttccccagtgtatatgcctgggagcggaaaaagatttctaattgcgttgctgattatagcgtactgtacaatagtacatttttttcaaccttcaaatgctacggtgttagcgccactaagctcaatgacttgtgcttttcaaatgtgtacgctgacagctttgttgtaaaaggcgacgatgtccgacagatagcacctggacaaactggtgtgattgcagattacaattacaaattgcccgacgattttatggggtgtgtgctcgcatggaatacccggaacattgatgctacctcaacaggaaactataactacaagtatcgatacttgcgacacgggaaactgaggccatttgagcgtgacatatcaaatgtgccattttcccccgacggaaaaccatgtactcctcccgctctgaattgctactggcccctgaacgattacggattctatactactaccggcattggctatcaaccttacagggttgtagtccttagctttgagttgctcaacgctcctgcaaccgtatgtgggccaaagctctcaactgatctcatcaaaaatcagtgcgtcaattttaactttaatggcctgacaggtactggtgttcttactagcggcggatcagggggtagcggcggctccggtggctctaatatcactaatctttgccccttcggggaagtatttaacgctactcgatttgctagcgtatatgcctggaaccggaagagaataagcaactgtgttgcagactatagcgtgctttacaattccgcatcctttagtaccttcaaatgttacggtgtgagccccaccaaactcaatgatctctgtttcacaaacgtgtacgcagatagtttcgttatacgcggggacgaagtacggcagatagcccctggccagacaggaaagatagccgattacaactacaaacttccagacgattttacagggtgtgtgatcgcttggaattcaaataacctggactccaaagtgggaggcaactataattacctgtaccgactgttccgcaaaagcaacttgaaacctttcgagcgagatatatcaaccgaaatctaccaagctggttctacaccttgtaatggtgtggagggatttaactgctacttccctcttcagtcctatggatttcagcctacaaatggagtcgggtatcaaccctatagagtcgtggtgttgtcatttgaacttctccatgcacctgctactgtctgtggtccaaaaaagtccactaatcttgtaaaaaacaaa

SEQ ID NO: 219 - protein, 670 aa, synthetic construct
  REGION 1..670: note = Ma_l1_Si_l2_S2
SGSVVEQAEGVECDFSPLLSGTPPQVYNFKRLVFTNCNYNLTKLLSLFSVNDFTCSQISPAAIASNCYSSLILDYFSYPLSMKSDLSVSSAGPISQFNYKQSFSNPTCLILATVPHNLTTITKPLKYSYINKCSRLLSDDRTEVPQLVNANQYSPCVSIVPSTVWEDGDYYRKQLSPLEGGGWLVASGSTVAMTEQLQMGFGITVQYGTDTNSVCPKLEFANDTKIASQLGNSGGGSGGGSGGGSNITNLCPFGEVFNATKFPSVYAWERKKISNCVADYSVLYNSTFFSTFKCYGVSATKLNDLCFSNVYADSFVVKGDDVRQIAPGQTGVIADYNYKLPDDFMGCVLAWNTRNIDATSTGNYNYKYRYLRHGKLRPFERDISNVPFSPDGKPCTPPALNCYWPLNDYGFYTTTGIGYQPYRVVVLSFELLNAPATVCGPKLSTDLIKNSGGSGGSGGSGGSNITNLCPFGEVFNATRFASVYAWNRKRISNCVADYSVLYNSASFSTFKCYGVSPTKLNDLCFTNVYADSFVIRGDEVRQIAPGQTGKIADYNYKLPDDFTGCVIAWNSNNLDSKVGGNYNYLYRLFRKSNLKPFERDISTEIYQAGSTPCNGVEGFNCYFPLQSYGFQPTNGVGYQPYRVVVLSFELLHAPATVCGPKKSTNLVKNK

SEQ ID NO: 220 - DNA, 2010 bp, synthetic construct
  misc_feature 1..2010: note = Ma_l1_Si_l2_S2
  source 1..2010: mol_type = other DNA
tcagggtccgtagttgagcaggcagagggcgtagagtgcgacttctcccccttgctttccgggactccaccccaggtgtataattttaaaaggcttgtctttactaactgcaactacaacttgaccaaacttctgagtctgttttctgttaatgacttcacatgctctcaaatatcacctgccgctatcgctagtaactgttacagctctcttatcttggattatttctcttatcccctctctatgaaatctgatctcagtgtaagtagtgcaggacccatttcccagtttaattacaaacaatcattctcaaatccaacatgcttgatactggctactgtccctcataacctgaccacaatcactaaaccactcaagtattcatacatcaacaagtgttcccgcctcctgtcagacgatcgaacagaggtccctcagttggtaaacgctaatcaatattcaccatgcgtgagcattgtcccaagcaccgtctgggaagatggggattactataggaaacagttgtcacctcttgagggagggggctggttggtcgcatccggtagcacagtggctatgactgaacagctgcaaatgggtttcggcataaccgtgcagtatgggaccgatacaaactccgtgtgtccaaaattggaatttgctaacgacacaaaaatagcctcacagttgggtaattctgggggaggaagtggagggggtagtggtggaggaagtaacataaccaacttgtgccccttcggggaggtattcaacgccaccaagttccccagtgtatatgcctgggagcggaaaaagatttctaattgcgttgctgattatagcgtactgtacaatagtacatttttttcaaccttcaaatgctacggtgttagcgccactaagctcaatgacttgtgcttttcaaatgtgtacgctgacagctttgttgtaaaaggcgacgatgtccgacagatagcacctggacaaactggtgtgattgcagattacaattacaaattgcccgacgattttatggggtgtgtgctcgcatggaatacccggaacattgatgctacctcaacaggaaactataactacaagtatcgatacttgcgacacgggaaactgaggccatttgagcgtgacatatcaaatgtgccattttcccccgacggaaaaccatgtactcctcccgctctgaattgctactggcccctgaacgattacggattctatactactaccggcattggctatcaaccttacagggttgtagtccttagctttgagttgctcaacgctcctgcaaccgtatgtgggccaaagctctcaactgatctcatcaaaaatagcggcggatcagggggtagcggcggctccggtggctctaatatcactaatctttgccccttcggggaagtatttaacgctactcgatttgctagcgtatatgcctggaaccggaagagaataagcaactgtgttgcagactatagcgtgctttacaattccgcatcctttagtaccttcaaatgttacggtgtgagccccaccaaactcaatgatctctgtttcacaaacgtgtacgcagatagtttcgttatacgcggggacgaagtacggcagatagcccctggccagacaggaaagatagccgattacaactacaaacttccagacgattttacagggtgtgtgatcgcttggaattcaaataacctggactccaaagtgggaggcaactataattacctgtaccgactgttccgcaaaagcaacttgaaacctttcgagcgagatatatcaaccgaaatctaccaagctggttctacaccttgtaatggtgtggagggatttaactgctacttccctcttcagtcctatggatttcagcctacaaatggagtcgggtatcaaccctatagagtcgtggtgttgtcatttgaacttctccatgcacctgctactgtctgtggtccaaaaaagtccactaatcttgtaaaaaacaaa

SEQ ID NO: 221 - protein, 692 aa, synthetic construct
  REGION 1..692: note = Mb_l1_Sh_l2_S2
SGSVVEQAEGVECDFSPLLSGTPPQVYNFKRLVFTNCNYNLTKLLSLFSVNDFTCSQISPAAIASNCYSSLILDYFSYPLSMKSDLSVSSAGPISQFNYKQSFSNPTCLILATVPHNLTTITKPLKYSYINKCSRLLSDDRTEVPQLVNANQYSPCVSIVPSTVWEDGDYYRKQLSPLEGGGWLVASGSTVAMTEQLQMGFGITVQYGTDTNSVCPKLEFANDTKSGGGSGGGSGGGSRVVPSGDVVRFPNITNLCPFGEVFNATKFPSVYAWERKKISNCVADYSVLYNSTFFSTFKCYGVSATKLNDLCFSNVYADSFVVKGDDVRQIAPGQTGVIADYNYKLPDDFMGCVLAWNTRNIDATSTGNYNYKYRYLRHGKLRPFERDISNVPFSPDGKPCTPPALNCYWPLNDYGFYTTTGIGYQPYRVVVLSFELLNAPATVCGPKLSTDLIKNQCVNFNFNGLTGTGVLTSGGSGGSGGSGGSNITNLCPFGEVFNATRFASVYAWNRKRISNCVADYSVLYNSASFSTFKCYGVSPTKLNDLCFTNVYADSFVIRGDEVRQIAPGQTGKIADYNYKLPDDFTGCVIAWNSNNLDSKVGGNYNYLYRLFRKSNLKPFERDISTEIYQAGSTPCNGVEGFNCYFPLQSYGFQPTNGVGYQPYRVVVLSFELLHAPATVCGPKKSTNLVKNK

SEQ ID NO: 222 - DNA, 2076 bp, synthetic construct
  misc_feature 1..2076: note = Mb_l1_Sh_l2_S2
  source 1..2076: mol_type = other DNA
tcagggtccgtagttgagcaggcagagggcgtagagtgcgacttctcccccttgctttccgggactccaccccaggtgtataattttaaaaggcttgtctttactaactgcaactacaacttgaccaaacttctgagtctgttttctgttaatgacttcacatgctctcaaatatcacctgccgctatcgctagtaactgttacagctctcttatcttggattatttctcttatcccctctctatgaaatctgatctcagtgtaagtagtgcaggacccatttcccagtttaattacaaacaatcattctcaaatccaacatgcttgatactggctactgtccctcataacctgaccacaatcactaaaccactcaagtattcatacatcaacaagtgttcccgcctcctgtcagacgatcgaacagaggtccctcagttggtaaacgctaatcaatattcaccatgcgtgagcattgtcccaagcaccgtctgggaagatggggattactataggaaacagttgtcacctcttgagggagggggctggttggtcgcatccggtagcacagtggctatgactgaacagctgcaaatgggtttcggcataaccgtgcagtatgggaccgatacaaactccgtgtgtccaaaattggaatttgctaacgacacaaaatctgggggaggaagtggagggggtagtggtggaggaagtagggtagttccctcaggcgatgtagttagatttccaaacataaccaacttgtgccccttcggggaggtattcaacgccaccaagttccccagtgtatatgcctgggagcggaaaaagatttctaattgcgttgctgattatagcgtactgtacaatagtacatttttttcaaccttcaaatgctacggtgttagcgccactaagctcaatgacttgtgcttttcaaatgtgtacgctgacagctttgttgtaaaaggcgacgatgtccgacagatagcacctggacaaactggtgtgattgcagattacaattacaaattgcccgacgattttatggggtgtgtgctcgcatggaatacccggaacattgatgctacctcaacaggaaactataactacaagtatcgatacttgcgacacgggaaactgaggccatttgagcgtgacatatcaaatgtgccattttcccccgacggaaaaccatgtactcctcccgctctgaattgctactggcccctgaacgattacggattctatactactaccggcattggctatcaaccttacagggttgtagtccttagctttgagttgctcaacgctcctgcaaccgtatgtgggccaaagctctcaactgatctcatcaaaaatcagtgcgtcaattttaactttaatggcctgacaggtactggtgttcttactagcggcggatcagggggtagcggcggctccggtggctctaatatcactaatctttgccccttcggggaagtatttaacgctactcgatttgctagcgtatatgcctggaaccggaagagaataagcaactgtgttgcagactatagcgtgctttacaattccgcatcctttagtaccttcaaatgttacggtgtgagccccaccaaactcaatgatctctgtttcacaaacgtgtacgcagatagtttcgttatacgcggggacgaagtacggcagatagcccctggccagacaggaaagatagccgattacaactacaaacttccagacgattttacagggtgtgtgatcgcttggaattcaaataacctggactccaaagtgggaggcaactataattacctgtaccgactgttccgcaaaagcaacttgaaacctttcgagcgagatatatcaaccgaaatctaccaagctggttctacaccttgtaatggtgtggagggatttaactgctacttccctcttcagtcctatggatttcagcctacaaatggagtcgggtatcaaccctatagagtcgtggtgttgtcatttgaacttctccatgcacctgctactgtctgtggtccaaaaaagtccactaatcttgtaaaaaacaaa

SEQ ID NO: 223 - protein, 663 aa, synthetic construct
  REGION 1..663: note = Mb_l1_Si_l2_S2
SGSVVEQAEGVECDFSPLLSGTPPQVYNFKRLVFTNCNYNLTKLLSLFSVNDFTCSQISPAAIASNCYSSLILDYFSYPLSMKSDLSVSSAGPISQFNYKQSFSNPTCLILATVPHNLTTITKPLKYSYINKCSRLLSDDRTEVPQLVNANQYSPCVSIVPSTVWEDGDYYRKQLSPLEGGGWLVASGSTVAMTEQLQMGFGITVQYGTDTNSVCPKLEFANDTKSGGGSGGGSGGGSNITNLCPFGEVFNATKFPSVYAWERKKISNCVADYSVLYNSTFFSTFKCYGVSATKLNDLCFSNVYADSFVVKGDDVRQIAPGQTGVIADYNYKLPDDFMGCVLAWNTRNIDATSTGNYNYKYRYLRHGKLRPFERDISNVPFSPDGKPCTPPALNCYWPLNDYGFYTTTGIGYQPYRVVVLSFELLNAPATVCGPKLSTDLIKNSGGSGGSGGSGGSNITNLCPFGEVFNATRFASVYAWNRKRISNCVADYSVLYNSASFSTFKCYGVSPTKLNDLCFTNVYADSFVIRGDEVRQIAPGQTGKIADYNYKLPDDFTGCVIAWNSNNLDSKVGGNYNYLYRLFRKSNLKPFERDISTEIYQAGSTPCNGVEGFNCYFPLQSYGFQPTNGVGYQPYRVVVLSFELLHAPATVCGPKKSTNLVKNK

SEQ ID NO: 224 - DNA, 1989 bp, synthetic construct
  misc_feature 1..1989: note = Mb_l1_Si_l2_S2
  source 1..1989: mol_type = other DNA
tcagggtccgtagttgagcaggcagagggcgtagagtgcgacttctcccccttgctttccgggactccaccccaggtgtataattttaaaaggcttgtctttactaactgcaactacaacttgaccaaacttctgagtctgttttctgttaatgacttcacatgctctcaaatatcacctgccgctatcgctagtaactgttacagctctcttatcttggattatttctcttatcccctctctatgaaatctgatctcagtgtaagtagtgcaggacccatttcccagtttaattacaaacaatcattctcaaatccaacatgcttgatactggctactgtccctcataacctgaccacaatcactaaaccactcaagtattcatacatcaacaagtgttcccgcctcctgtcagacgatcgaacagaggtccctcagttggtaaacgctaatcaatattcaccatgcgtgagcattgtcccaagcaccgtctgggaagatggggattactataggaaacagttgtcacctcttgagggagggggctggttggtcgcatccggtagcacagtggctatgactgaacagctgcaaatgggtttcggcataaccgtgcagtatgggaccgatacaaactccgtgtgtccaaaattggaatttgctaacgacacaaaatctgggggaggaagtggagggggtagtggtggaggaagtaacataaccaacttgtgccccttcggggaggtattcaacgccaccaagttccccagtgtatatgcctgggagcggaaaaagatttctaattgcgttgctgattatagcgtactgtacaatagtacatttttttcaaccttcaaatgctacggtgttagcgccactaagctcaatgacttgtgcttttcaaatgtgtacgctgacagctttgttgtaaaaggcgacgatgtccgacagatagcacctggacaaactggtgtgattgcagattacaattacaaattgcccgacgattttatggggtgtgtgctcgcatggaatacccggaacattgatgctacctcaacaggaaactataactacaagtatcgatacttgcgacacgggaaactgaggccatttgagcgtgacatatcaaatgtgccattttcccccgacggaaaaccatgtactcctcccgctctgaattgctactggcccctgaacgattacggattctatactactaccggcattggctatcaaccttacagggttgtagtccttagctttgagttgctcaacgctcctgcaaccgtatgtgggccaaagctctcaactgatctcatcaaaaatagcggcggatcagggggtagcggcggctccggtggctctaatatcactaatctttgccccttcggggaagtatttaacgctactcgatttgctagcgtatatgcctggaaccggaagagaataagcaactgtgttgcagactatagcgtgctttacaattccgcatcctttagtaccttcaaatgttacggtgtgagccccaccaaactcaatgatctctgtttcacaaacgtgtacgcagatagtttcgttatacgcggggacgaagtacggcagatagcccctggccagacaggaaagatagccgattacaactacaaacttccagacgattttacagggtgtgtgatcgcttggaattcaaataacctggactccaaagtgggaggcaactataattacctgtaccgactgttccgcaaaagcaacttgaaacctttcgagcgagatatatcaaccgaaatctaccaagctggttctacaccttgtaatggtgtggagggatttaactgctacttccctcttcagtcctatggatttcagcctacaaatggagtcgggtatcaaccctatagagtcgtggtgttgtcatttgaacttctccatgcacctgctactgtctgtggtccaaaaaagtccactaatcttgtaaaaaacaaa

SEQ ID NO: 225 - protein, 681 aa, synthetic construct
  REGION 1..681: note = Mc_l1_Sh_l2_S2
EQAEGVECDFSPLLSGTPPQVYNFKRLVFTNCNYNLTKLLSLFSVNDFTCSQISPAAIASNCYSSLILDYFSYPLSMKSDLSVSSAGPISQFNYKQSFSNPTCLILATVPHNLTTITKPLKYSYINKCSRLLSDDRTEVPQLVNANQYSPCVSIVPSTVWEDGDYYRKQLSPLEGGGWLVASGSTVAMTEQLQMGFGITVQYGTDTNSVCPKLESGGGSGGGSGGGSRVVPSGDVVRFPNITNLCPFGEVFNATKFPSVYAWERKKISNCVADYSVLYNSTFFSTFKCYGVSATKLNDLCFSNVYADSFVVKGDDVRQIAPGQTGVIADYNYKLPDDFMGCVLAWNTRNIDATSTGNYNYKYRYLRHGKLRPFERDISNVPFSPDGKPCTPPALNCYWPLNDYGFYTTTGIGYQPYRVVVLSFELLNAPATVCGPKLSTDLIKNQCVNFNFNGLTGTGVLTSGGSGGSGGSGGSNITNLCPFGEVFNATRFASVYAWNRKRISNCVADYSVLYNSASFSTFKCYGVSPTKLNDLCFTNVYADSFVIRGDEVRQIAPGQTGKIADYNYKLPDDFTGCVIAWNSNNLDSKVGGNYNYLYRLFRKSNLKPFERDISTEIYQAGSTPCNGVEGFNCYFPLQSYGFQPTNGVGYQPYRVVVLSFELLHAPATVCGPKKSTNLVKNK

SEQ ID NO: 226 - DNA, 2043 bp, synthetic construct
  misc_feature 1..2043: note = Mc_l1_Sh_l2_S2
  source 1..2043: mol_type = other DNA
gagcaggcagagggcgtagagtgcgacttctcccccttgctttccgggactccaccccaggtgtataattttaaaaggcttgtctttactaactgcaactacaacttgaccaaacttctgagtctgttttctgttaatgacttcacatgctctcaaatatcacctgccgctatcgctagtaactgttacagctctcttatcttggattatttctcttatcccctctctatgaaatctgatctcagtgtaagtagtgcaggacccatttcccagtttaattacaaacaatcattctcaaatccaacatgcttgatactggctactgtccctcataacctgaccacaatcactaaaccactcaagtattcatacatcaacaagtgttcccgcctcctgtcagacgatcgaacagaggtccctcagttggtaaacgctaatcaatattcaccatgcgtgagcattgtcccaagcaccgtctgggaagatggggattactataggaaacagttgtcacctcttgagggagggggctggttggtcgcatccggtagcacagtggctatgactgaacagctgcaaatgggtttcggcataaccgtgcagtatgggaccgatacaaactccgtgtgtccaaaattggaatctgggggaggaagtggagggggtagtggtggaggaagtagggtagttccctcaggcgatgtagttagatttccaaacataaccaacttgtgccccttcggggaggtattcaacgccaccaagttccccagtgtatatgcctgggagcggaaaaagatttctaattgcgttgctgattatagcgtactgtacaatagtacatttttttcaaccttcaaatgctacggtgttagcgccactaagctcaatgacttgtgcttttcaaatgtgtacgctgacagctttgttgtaaaaggcgacgatgtccgacagatagcacctggacaaactggtgtgattgcagattacaattacaaattgcccgacgattttatggggtgtgtgctcgcatggaatacccggaacattgatgctacctcaacaggaaactataactacaagtatcgatacttgcgacacgggaaactgaggccatttgagcgtgacatatcaaatgtgccattttcccccgacggaaaaccatgtactcctcccgctctgaattgctactggcccctgaacgattacggattctatactactaccggcattggctatcaaccttacagggttgtagtccttagctttgagttgctcaacgctcctgcaaccgtatgtgggccaaagctctcaactgatctcatcaaaaatcagtgcgtcaattttaactttaatggcctgacaggtactggtgttcttactagcggcggatcagggggtagcggcggctccggtggctctaatatcactaatctttgccccttcggggaagtatttaacgctactcgatttgctagcgtatatgcctggaaccggaagagaataagcaactgtgttgcagactatagcgtgctttacaattccgcatcctttagtaccttcaaatgttacggtgtgagccccaccaaactcaatgatctctgtttcacaaacgtgtacgcagatagtttcgttatacgcggggacgaagtacggcagatagcccctggccagacaggaaagatagccgattacaactacaaacttccagacgattttacagggtgtgtgatcgcttggaattcaaataacctggactccaaagtgggaggcaactataattacctgtaccgactgttccgcaaaagcaacttgaaacctttcgagcgagatatatcaaccgaaatctaccaagctggttctacaccttgtaatggtgtggagggatttaactgctacttccctcttcagtcctatggatttcagcctacaaatggagtcgggtatcaaccctatagagtcgtggtgttgtcatttgaacttctccatgcacctgctactgtctgtggtccaaaaaagtccactaatcttgtaaaaaacaaa

SEQ ID NO: 227 - protein, 652 aa, synthetic construct
  REGION 1..652: note = Mc_l1_Si_l2_S2
EQAEGVECDFSPLLSGTPPQVYNFKRLVFTNCNYNLTKLLSLFSVNDFTCSQISPAAIASNCYSSLILDYFSYPLSMKSDLSVSSAGPISQFNYKQSFSNPTCLILATVPHNLTTITKPLKYSYINKCSRLLSDDRTEVPQLVNANQYSPCVSIVPSTVWEDGDYYRKQLSPLEGGGWLVASGSTVAMTEQLQMGFGITVQYGTDTNSVCPKLESGGGSGGGSGGGSNITNLCPFGEVFNATKFPSVYAWERKKISNCVADYSVLYNSTFFSTFKCYGVSATKLNDLCFSNVYADSFVVKGDDVRQIAPGQTGVIADYNYKLPDDFMGCVLAWNTRNIDATSTGNYNYKYRYLRHGKLRPFERDISNVPFSPDGKPCTPPALNCYWPLNDYGFYTTTGIGYQPYRVVVLSFELLNAPATVCGPKLSTDLIKNSGGSGGSGGSGGSNITNLCPFGEVFNATRFASVYAWNRKRISNCVADYSVLYNSASFSTFKCYGVSPTKLNDLCFTNVYADSFVIRGDEVRQIAPGQTGKIADYNYKLPDDFTGCVIAWNSNNLDSKVGGNYNYLYRLFRKSNLKPFERDISTEIYQAGSTPCNGVEGFNCYFPLQSYGFQPTNGVGYQPYRVVVLSFELLHAPATVCGPKKSTNLVKNK

SEQ ID NO: 228 - DNA, 1956 bp, synthetic construct
  misc_feature 1..1956: note = Mc_l1_Si_l2_S2
  source 1..1956: mol_type = other DNA
gagcaggcagagggcgtagagtgcgacttctcccccttgctttccgggactccaccccaggtgtataattttaaaaggcttgtctttactaactgcaactacaacttgaccaaacttctgagtctgttttctgttaatgacttcacatgctctcaaatatcacctgccgctatcgctagtaactgttacagctctcttatcttggattatttctcttatcccctctctatgaaatctgatctcagtgtaagtagtgcaggacccatttcccagtttaattacaaacaatcattctcaaatccaacatgcttgatactggctactgtccctcataacctgaccacaatcactaaaccactcaagtattcatacatcaacaagtgttcccgcctcctgtcagacgatcgaacagaggtccctcagttggtaaacgctaatcaatattcaccatgcgtgagcattgtcccaagcaccgtctgggaagatggggattactataggaaacagttgtcacctcttgagggagggggctggttggtcgcatccggtagcacagtggctatgactgaacagctgcaaatgggtttcggcataaccgtgcagtatgggaccgatacaaactccgtgtgtccaaaattggaatctgggggaggaagtggagggggtagtggtggaggaagtaacataaccaacttgtgccccttcggggaggtattcaacgccaccaagttccccagtgtatatgcctgggagcggaaaaagatttctaattgcgttgctgattatagcgtactgtacaatagtacatttttttcaaccttcaaatgctacggtgttagcgccactaagctcaatgacttgtgcttttcaaatgtgtacgctgacagctttgttgtaaaaggcgacgatgtccgacagatagcacctggacaaactggtgtgattgcagattacaattacaaattgcccgacgattttatggggtgtgtgctcgcatggaatacccggaacattgatgctacctcaacaggaaactataactacaagtatcgatacttgcgacacgggaaactgaggccatttgagcgtgacatatcaaatgtgccattttcccccgacggaaaaccatgtactcctcccgctctgaattgctactggcccctgaacgattacggattctatactactaccggcattggctatcaaccttacagggttgtagtccttagctttgagttgctcaacgctcctgcaaccgtatgtgggccaaagctctcaactgatctcatcaaaaatagcggcggatcagggggtagcggcggctccggtggctctaatatcactaatctttgccccttcggggaagtatttaacgctactcgatttgctagcgtatatgcctggaaccggaagagaataagcaactgtgttgcagactatagcgtgctttacaattccgcatcctttagtaccttcaaatgttacggtgtgagccccaccaaactcaatgatctctgtttcacaaacgtgtacgcagatagtttcgttatacgcggggacgaagtacggcagatagcccctggccagacaggaaagatagccgattacaactacaaacttccagacgattttacagggtgtgtgatcgcttggaattcaaataacctggactccaaagtgggaggcaactataattacctgtaccgactgttccgcaaaagcaacttgaaacctttcgagcgagatatatcaaccgaaatctaccaagctggttctacaccttgtaatggtgtggagggatttaactgctacttccctcttcagtcctatggatttcagcctacaaatggagtcgggtatcaaccctatagagtcgtggtgttgtcatttgaacttctccatgcacctgctactgtctgtggtccaaaaaagtccactaatcttgtaaaaaacaaa

SEQ ID NO: 229 - protein, 676 aa, synthetic construct
  REGION 1..676: note = Md_l1_Sh_l2_S2
EGVECDFSPLLSGTPPQVYNFKRLVFTNCNYNLTKLLSLFSVNDFTCSQISPAAIASNCYSSLILDYFSYPLSMKSDLSVSSAGPISQFNYKQSFSNPTCLILATVPHNLTTITKPLKYSYINKCSRLLSDDRTEVPQLVNANQYSPCVSIVPSTVWEDGDYYRKQLSPLEGGGWLVASGSTVAMTEQLQMGFGITVQYGTDTNSVCPKSGGGSGGGSGGGSRVVPSGDVVRFPNITNLCPFGEVFNATKFPSVYAWERKKISNCVADYSVLYNSTFFSTFKCYGVSATKLNDLCFSNVYADSFVVKGDDVRQIAPGQTGVIADYNYKLPDDFMGCVLAWNTRNIDATSTGNYNYKYRYLRHGKLRPFERDISNVPFSPDGKPCTPPALNCYWPLNDYGFYTTTGIGYQPYRVVVLSFELLNAPATVCGPKLSTDLIKNQCVNFNFNGLTGTGVLTSGGSGGSGGSGGSNITNLCPFGEVFNATRFASVYAWNRKRISNCVADYSVLYNSASFSTFKCYGVSPTKLNDLCFTNVYADSFVIRGDEVRQIAPGQTGKIADYNYKLPDDFTGCVIAWNSNNLDSKVGGNYNYLYRLFRKSNLKPFERDISTEIYQAGSTPCNGVEGFNCYFPLQSYGFQPTNGVGYQPYRVVVLSFELLHAPATVCGPKKSTNLVKNK

SEQ ID NO: 230 - DNA, 2028 bp, synthetic construct
  misc_feature 1..2028: note = Md_l1_Sh_l2_S2
  source 1..2028: mol_type = other DNA
gagggcgtagagtgcgacttctcccccttgctttccgggactccaccccaggtgtataattttaaaaggcttgtctttactaactgcaactacaacttgaccaaacttctgagtctgttttctgttaatgacttcacatgctctcaaatatcacctgccgctatcgctagtaactgttacagctctcttatcttggattatttctcttatcccctctctatgaaatctgatctcagtgtaagtagtgcaggacccatttcccagtttaattacaaacaatcattctcaaatccaacatgcttgatactggctactgtccctcataacctgaccacaatcactaaaccactcaagtattcatacatcaacaagtgttcccgcctcctgtcagacgatcgaacagaggtccctcagttggtaaacgctaatcaatattcaccatgcgtgagcattgtcccaagcaccgtctgggaagatggggattactataggaaacagttgtcacctcttgagggagggggctggttggtcgcatccggtagcacagtggctatgactgaacagctgcaaatgggtttcggcataaccgtgcagtatgggaccgatacaaactccgtgtgtccaaaatctgggggaggaagtggagggggtagtggtggaggaagtagggtagttccctcaggcgatgtagttagatttccaaacataaccaacttgtgccccttcggggaggtattcaacgccaccaagttccccagtgtatatgcctgggagcggaaaaagatttctaattgcgttgctgattatagcgtactgtacaatagtacatttttttcaaccttcaaatgctacggtgttagcgccactaagctcaatgacttgtgcttttcaaatgtgtacgctgacagctttgttgtaaaaggcgacgatgtccgacagatagcacctggacaaactggtgtgattgcagattacaattacaaattgcccgacgattttatggggtgtgtgctcgcatggaatacccggaacattgatgctacctcaacaggaaactataactacaagtatcgatacttgcgacacgggaaactgaggccatttgagcgtgacatatcaaatgtgccattttcccccgacggaaaaccatgtactcctcccgctctgaattgctactggcccctgaacgattacggattctatactactaccggcattggctatcaaccttacagggttgtagtccttagctttgagttgctcaacgctcctgcaaccgtatgtgggccaaagctctcaactgatctcatcaaaaatcagtgcgtcaattttaactttaatggcctgacaggtactggtgttcttactagcggcggatcagggggtagcggcggctccggtggctctaatatcactaatctttgccccttcggggaagtatttaacgctactcgatttgctagcgtatatgcctggaaccggaagagaataagcaactgtgttgcagactatagcgtgctttacaattccgcatcctttagtaccttcaaatgttacggtgtgagccccaccaaactcaatgatctctgtttcacaaacgtgtacgcagatagtttcgttatacgcggggacgaagtacggcagatagcccctggccagacaggaaagatagccgattacaactacaaacttccagacgattttacagggtgtgtgatcgcttggaattcaaataacctggactccaaagtgggaggcaactataattacctgtaccgactgttccgcaaaagcaacttgaaacctttcgagcgagatatatcaaccgaaatctaccaagctggttctacaccttgtaatggtgtggagggatttaactgctacttccctcttcagtcctatggatttcagcctacaaatggagtcgggtatcaaccctatagagtcgtggtgttgtcatttgaacttctccatgcacctgctactgtctgtggtccaaaaaagtccactaatcttgtaaaaaacaaa

SEQ ID NO: 231 - protein, 647 aa, synthetic construct
  REGION 1..647: note = Md_l1_Si_l2_S2
EGVECDFSPLLSGTPPQVYNFKRLVFTNCNYNLTKLLSLFSVNDFTCSQISPAAIASNCYSSLILDYFSYPLSMKSDLSVSSAGPISQFNYKQSFSNPTCLILATVPHNLTTITKPLKYSYINKCSRLLSDDRTEVPQLVNANQYSPCVSIVPSTVWEDGDYYRKQLSPLEGGGWLVASGSTVAMTEQLQMGFGITVQYGTDTNSVCPKSGGGSGGGSGGGSNITNLCPFGEVFNATKFPSVYAWERKKISNCVADYSVLYNSTFFSTFKCYGVSATKLNDLCFSNVYADSFVVKGDDVRQIAPGQTGVIADYNYKLPDDFMGCVLAWNTRNIDATSTGNYNYKYRYLRHGKLRPFERDISNVPFSPDGKPCTPPALNCYWPLNDYGFYTTTGIGYQPYRVVVLSFELLNAPATVCGPKLSTDLIKNSGGSGGSGGSGGSNITNLCPFGEVFNATRFASVYAWNRKRISNCVADYSVLYNSASFSTFKCYGVSPTKLNDLCFTNVYADSFVIRGDEVRQIAPGQTGKIADYNYKLPDDFTGCVIAWNSNNLDSKVGGNYNYLYRLFRKSNLKPFERDISTEIYQAGSTPCNGVEGFNCYFPLQSYGFQPTNGVGYQPYRVVVLSFELLHAPATVCGPKKSTNLVKNK

SEQ ID NO: 232 - DNA, 1941 bp, synthetic construct
  misc_feature 1..1941: note = Md_l1_Si_l2_S2
  source 1..1941: mol_type = other DNA
gagggcgtagagtgcgacttctcccccttgctttccgggactccaccccaggtgtataattttaaaaggcttgtctttactaactgcaactacaacttgaccaaacttctgagtctgttttctgttaatgacttcacatgctctcaaatatcacctgccgctatcgctagtaactgttacagctctcttatcttggattatttctcttatcccctctctatgaaatctgatctcagtgtaagtagtgcaggacccatttcccagtttaattacaaacaatcattctcaaatccaacatgcttgatactggctactgtccctcataacctgaccacaatcactaaaccactcaagtattcatacatcaacaagtgttcccgcctcctgtcagacgatcgaacagaggtccctcagttggtaaacgctaatcaatattcaccatgcgtgagcattgtcccaagcaccgtctgggaagatggggattactataggaaacagttgtcacctcttgagggagggggctggttggtcgcatccggtagcacagtggctatgactgaacagctgcaaatgggtttcggcataaccgtgcagtatgggaccgatacaaactccgtgtgtccaaaatctgggggaggaagtggagggggtagtggtggaggaagtaacataaccaacttgtgccccttcggggaggtattcaacgccaccaagttccccagtgtatatgcctgggagcggaaaaagatttctaattgcgttgctgattatagcgtactgtacaatagtacatttttttcaaccttcaaatgctacggtgttagcgccactaagctcaatgacttgtgcttttcaaatgtgtacgctgacagctttgttgtaaaaggcgacgatgtccgacagatagcacctggacaaactggtgtgattgcagattacaattacaaattgcccgacgattttatggggtgtgtgctcgcatggaatacccggaacattgatgctacctcaacaggaaactataactacaagtatcgatacttgcgacacgggaaactgaggccatttgagcgtgacatatcaaatgtgccattttcccccgacggaaaaccatgtactcctcccgctctgaattgctactggcccctgaacgattacggattctatactactaccggcattggctatcaaccttacagggttgtagtccttagctttgagttgctcaacgctcctgcaaccgtatgtgggccaaagctctcaactgatctcatcaaaaatagcggcggatcagggggtagcggcggctccggtggctctaatatcactaatctttgccccttcggggaagtatttaacgctactcgatttgctagcgtatatgcctggaaccggaagagaataagcaactgtgttgcagactatagcgtgctttacaattccgcatcctttagtaccttcaaatgttacggtgtgagccccaccaaactcaatgatctctgtttcacaaacgtgtacgcagatagtttcgttatacgcggggacgaagtacggcagatagcccctggccagacaggaaagatagccgattacaactacaaacttccagacgattttacagggtgtgtgatcgcttggaattcaaataacctggactccaaagtgggaggcaactataattacctgtaccgactgttccgcaaaagcaacttgaaacctttcgagcgagatatatcaaccgaaatctaccaagctggttctacaccttgtaatggtgtggagggatttaactgctacttccctcttcagtcctatggatttcagcctacaaatggagtcgggtatcaaccctatagagtcgtggtgttgtcatttgaacttctccatgcacctgctactgtctgtggtccaaaaaagtccactaatcttgtaaaaaacaaa

SEQ ID NO: 233 - protein, 686 aa, synthetic construct
  REGION 1..686: note = Me_l1_Sh_l2_S2
SGSVVEQAEGVECDFSPLLSGTPPQVYNFKRLVFTNCNYNLTKLLSLFSVNDFTCSQISPAAIASNCYSSLILDYFSYPLSMKSDLSVSSAGPISQFNYKQSFSNPTCLILATVPHNLTTITKPLKYSYINKCSRLLSDDRTEVPQLVNANQYSPCVSIVPSTVWEDGDYYRKQLSPLEGGGWLVASGSTVAMTEQLQMGFGITVQYGTDTNSVCPKLESGGGSGGGSGGGSRVVPSGDVVRFPNITNLCPFGEVFNATKFPSVYAWERKKISNCVADYSVLYNSTFFSTFKCYGVSATKLNDLCFSNVYADSFVVKGDDVRQIAPGQTGVIADYNYKLPDDFMGCVLAWNTRNIDATSTGNYNYKYRYLRHGKLRPFERDISNVPFSPDGKPCTPPALNCYWPLNDYGFYTTTGIGYQPYRVVVLSFELLNAPATVCGPKLSTDLIKNQCVNFNFNGLTGTGVLTSGGSGGSGGSGGSNITNLCPFGEVFNATRFASVYAWNRKRISNCVADYSVLYNSASFSTFKCYGVSPTKLNDLCFTNVYADSFVIRGDEVRQIAPGQTGKIADYNYKLPDDFTGCVIAWNSNNLDSKVGGNYNYLYRLFRKSNLKPFERDISTEIYQAGSTPCNGVEGFNCYFPLQSYGFQPTNGVGYQPYRVVVLSFELLHAPATVCGPKKSTNLVKNK

SEQ ID NO: 234 - DNA, 2058 bp, synthetic construct
  misc_feature 1..2058: note = Me_l1_Sh_l2_S2
  source 1..2058: mol_type = other DNA
tcagggtccgtagttgagcaggcagagggcgtagagtgcgacttctcccccttgctttccgggactccaccccaggtgtataattttaaaaggcttgtctttactaactgcaactacaacttgaccaaacttctgagtctgttttctgttaatgacttcacatgctctcaaatatcacctgccgctatcgctagtaactgttacagctctcttatcttggattatttctcttatcccctctctatgaaatctgatctcagtgtaagtagtgcaggacccatttcccagtttaattacaaacaatcattctcaaatccaacatgcttgatactggctactgtccctcataacctgaccacaatcactaaaccactcaagtattcatacatcaacaagtgttcccgcctcctgtcagacgatcgaacagaggtccctcagttggtaaacgctaatcaatattcaccatgcgtgagcattgtcccaagcaccgtctgggaagatggggattactataggaaacagttgtcacctcttgagggagggggctggttggtcgcatccggtagcacagtggctatgactgaacagctgcaaatgggtttcggcataaccgtgcagtatgggaccgatacaaactccgtgtgtccaaaattggaatctgggggaggaagtggagggggtagtggtggaggaagtagggtagttccctcaggcgatgtagttagatttccaaacataaccaacttgtgccccttcggggaggtattcaacgccaccaagttccccagtgtatatgcctgggagcggaaaaagatttctaattgcgttgctgattatagcgtactgtacaatagtacatttttttcaaccttcaaatgctacggtgttagcgccactaagctcaatgacttgtgcttttcaaatgtgtacgctgacagctttgttgtaaaaggcgacgatgtccgacagatagcacctggacaaactggtgtgattgcagattacaattacaaattgcccgacgattttatggggtgtgtgctcgcatggaatacccggaacattgatgctacctcaacaggaaactataactacaagtatcgatacttgcgacacgggaaactgaggccatttgagcgtgacatatcaaatgtgccattttcccccgacggaaaaccatgtactcctcccgctctgaattgctactggcccctgaacgattacggattctatactactaccggcattggctatcaaccttacagggttgtagtccttagctttgagttgctcaacgctcctgcaaccgtatgtgggccaaagctctcaactgatctcatcaaaaatcagtgcgtcaattttaactttaatggcctgacaggtactggtgttcttactagcggcggatcagggggtagcggcggctccggtggctctaatatcactaatctttgccccttcggggaagtatttaacgctactcgatttgctagcgtatatgcctggaaccggaagagaataagcaactgtgttgcagactatagcgtgctttacaattccgcatcctttagtaccttcaaatgttacggtgtgagccccaccaaactcaatgatctctgtttcacaaacgtgtacgcagatagtttcgttatacgcggggacgaagtacggcagatagcccctggccagacaggaaagatagccgattacaactacaaacttccagacgattttacagggtgtgtgatcgcttggaattcaaataacctggactccaaagtgggaggcaactataattacctgtaccgactgttccgcaaaagcaacttgaaacctttcgagcgagatatatcaaccgaaatctaccaagctggttctacaccttgtaatggtgtggagggatttaactgctacttccctcttcagtcctatggatttcagcctacaaatggagtcgggtatcaaccctatagagtcgtggtgttgtcatttgaacttctccatgcacctgctactgtctgtggtccaaaaaagtccactaatcttgtaaaaaacaaa

SEQ ID NO: 235 - protein, 657 aa, synthetic construct
  REGION 1..657: note = Me_l1_Si_l2_S2
SGSVVEQAEGVECDFSPLLSGTPPQVYNFKRLVFTNCNYNLTKLLSLFSVNDFTCSQISPAAIASNCYSSLILDYFSYPLSMKSDLSVSSAGPISQFNYKQSFSNPTCLILATVPHNLTTITKPLKYSYINKCSRLLSDDRTEVPQLVNANQYSPCVSIVPSTVWEDGDYYRKQLSPLEGGGWLVASGSTVAMTEQLQMGFGITVQYGTDTNSVCPKLESGGGSGGGSGGGSNITNLCPFGEVFNATKFPSVYAWERKKISNCVADYSVLYNSTFFSTFKCYGVSATKLNDLCFSNVYADSFVVKGDDVRQIAPGQTGVIADYNYKLPDDFMGCVLAWNTRNIDATSTGNYNYKYRYLRHGKLRPFERDISNVPFSPDGKPCTPPALNCYWPLNDYGFYTTTGIGYQPYRVVVLSFELLNAPATVCGPKLSTDLIKNSGGSGGSGGSGGSNITNLCPFGEVFNATRFASVYAWNRKRISNCVADYSVLYNSASFSTFKCYGVSPTKLNDLCFTNVYADSFVIRGDEVRQIAPGQTGKIADYNYKLPDDFTGCVIAWNSNNLDSKVGGNYNYLYRLFRKSNLKPFERDISTEIYQAGSTPCNGVEGFNCYFPLQSYGFQPTNGVGYQPYRVVVLSFELLHAPATVCGPKKSTNLVKNK

SEQ ID NO: 236 - DNA, 1971 bp, synthetic construct
  misc_feature 1..1971: note = Me_l1_Si_l2_S2
  source 1..1971: mol_type = other DNA
tcagggtccgtagttgagcaggcagagggcgtagagtgcgacttctcccccttgctttccgggactccaccccaggtgtataattttaaaaggcttgtctttactaactgcaactacaacttgaccaaacttctgagtctgttttctgttaatgacttcacatgctctcaaatatcacctgccgctatcgctagtaactgttacagctctcttatcttggattatttctcttatcccctctctatgaaatctgatctcagtgtaagtagtgcaggacccatttcccagtttaattacaaacaatcattctcaaatccaacatgcttgatactggctactgtccctcataacctgaccacaatcactaaaccactcaagtattcatacatcaacaagtgttcccgcctcctgtcagacgatcgaacagaggtccctcagttggtaaacgctaatcaatattcaccatgcgtgagcattgtcccaagcaccgtctgggaagatggggattactataggaaacagttgtcacctcttgagggagggggctggttggtcgcatccggtagcacagtggctatgactgaacagctgcaaatgggtttcggcataaccgtgcagtatgggaccgatacaaactccgtgtgtccaaaattggaatctgggggaggaagtggagggggtagtggtggaggaagtaacataaccaacttgtgccccttcggggaggtattcaacgccaccaagttccccagtgtatatgcctgggagcggaaaaagatttctaattgcgttgctgattatagcgtactgtacaatagtacatttttttcaaccttcaaatgctacggtgttagcgccactaagctcaatgacttgtgcttttcaaatgtgtacgctgacagctttgttgtaaaaggcgacgatgtccgacagatagcacctggacaaactggtgtgattgcagattacaattacaaattgcccgacgattttatggggtgtgtgctcgcatggaatacccggaacattgatgctacctcaacaggaaactataactacaagtatcgatacttgcgacacgggaaactgaggccatttgagcgtgacatatcaaatgtgccattttcccccgacggaaaaccatgtactcctcccgctctgaattgctactggcccctgaacgattacggattctatactactaccggcattggctatcaaccttacagggttgtagtccttagctttgagttgctcaacgctcctgcaaccgtatgtgggccaaagctctcaactgatctcatcaaaaatagcggcggatcagggggtagcggcggctccggtggctctaatatcactaatctttgccccttcggggaagtatttaacgctactcgatttgctagcgtatatgcctggaaccggaagagaataagcaactgtgttgcagactatagcgtgctttacaattccgcatcctttagtaccttcaaatgttacggtgtgagccccaccaaactcaatgatctctgtttcacaaacgtgtacgcagatagtttcgttatacgcggggacgaagtacggcagatagcccctggccagacaggaaagatagccgattacaactacaaacttccagacgattttacagggtgtgtgatcgcttggaattcaaataacctggactccaaagtgggaggcaactataattacctgtaccgactgttccgcaaaagcaacttgaaacctttcgagcgagatatatcaaccgaaatctaccaagctggttctacaccttgtaatggtgtggagggatttaactgctacttccctcttcagtcctatggatttcagcctacaaatggagtcgggtatcaaccctatagagtcgtggtgttgtcatttgaacttctccatgcacctgctactgtctgtggtccaaaaaagtccactaatcttgtaaaaaacaaa

SEQ ID NO: 237 - protein, 687 aa, synthetic construct
  REGION 1..687: note = Mf_l1_Sh_l2_S2
EQAEGVECDFSPLLSGTPPQVYNFKRLVFTNCNYNLTKLLSLFSVNDFTCSQISPAAIASNCYSSLILDYFSYPLSMKSDLSVSSAGPISQFNYKQSFSNPTCLILATVPHNLTTITKPLKYSYINKCSRLLSDDRTEVPQLVNANQYSPCVSIVPSTVWEDGDYYRKQLSPLEGGGWLVASGSTVAMTEQLQMGFGITVQYGTDTNSVCPKLEFANDTKSGGGSGGGSGGGSRVVPSGDVVRFPNITNLCPFGEVFNATKFPSVYAWERKKISNCVADYSVLYNSTFFSTFKCYGVSATKLNDLCFSNVYADSFVVKGDDVRQIAPGQTGVIADYNYKLPDDFMGCVLAWNTRNIDATSTGNYNYKYRYLRHGKLRPFERDISNVPFSPDGKPCTPPALNCYWPLNDYGFYTTTGIGYQPYRVVVLSFELLNAPATVCGPKLSTDLIKNQCVNFNFNGLTGTGVLTSGGSGGSGGSGGSNITNLCPFGEVFNATRFASVYAWNRKRISNCVADYSVLYNSASFSTFKCYGVSPTKLNDLCFTNVYADSFVIRGDEVRQIAPGQTGKIADYNYKLPDDFTGCVIAWNSNNLDSKVGGNYNYLYRLFRKSNLKPFERDISTEIYQAGSTPCNGVEGFNCYFPLQSYGFQPTNGVGYQPYRVVVLSFELLHAPATVCGPKKSTNLVKNK

SEQ ID NO: 238 - DNA, 2061 bp, synthetic construct
  misc_feature 1..2061: note = Mf_l1_Sh_l2_S2
  source 1..2061: mol_type = other DNA
gagcaggcagagggcgtagagtgcgacttctcccccttgctttccgggactccaccccaggtgtataattttaaaaggcttgtctttactaactgcaactacaacttgaccaaacttctgagtctgttttctgttaatgacttcacatgctctcaaatatcacctgccgctatcgctagtaactgttacagctctcttatcttggattatttctcttatcccctctctatgaaatctgatctcagtgtaagtagtgcaggacccatttcccagtttaattacaaacaatcattctcaaatccaacatgcttgatactggctactgtccctcataacctgaccacaatcactaaaccactcaagtattcatacatcaacaagtgttcccgcctcctgtcagacgatcgaacagaggtccctcagttggtaaacgctaatcaatattcaccatgcgtgagcattgtcccaagcaccgtctgggaagatggggattactataggaaacagttgtcacctcttgagggagggggctggttggtcgcatccggtagcacagtggctatgactgaacagctgcaaatgggtttcggcataaccgtgcagtatgggaccgatacaaactccgtgtgtccaaaattggaatttgctaacgacacaaaatctgggggaggaagtggagggggtagtggtggaggaagtagggtagttccctcaggcgatgtagttagatttccaaacataaccaacttgtgccccttcggggaggtattcaacgccaccaagttccccagtgtatatgcctgggagcggaaaaagatttctaattgcgttgctgattatagcgtactgtacaatagtacatttttttcaaccttcaaatgctacggtgttagcgccactaagctcaatgacttgtgcttttcaaatgtgtacgctgacagctttgttgtaaaaggcgacgatgtccgacagatagcacctggacaaactggtgtgattgcagattacaattacaaattgcccgacgattttatggggtgtgtgctcgcatggaatacccggaacattgatgctacctcaacaggaaactataactacaagtatcgatacttgcgacacgggaaactgaggccatttgagcgtgacatatcaaatgtgccattttcccccgacggaaaaccatgtactcctcccgctctgaattgctactggcccctgaacgattacggattctatactactaccggcattggctatcaaccttacagggttgtagtccttagctttgagttgctcaacgctcctgcaaccgtatgtgggccaaagctctcaactgatctcatcaaaaatcagtgcgtcaattttaactttaatggcctgacaggtactggtgttcttactagcggcggatcagggggtagcggcggctccggtggctctaatatcactaatctttgccccttcggggaagtatttaacgctactcgatttgctagcgtatatgcctggaaccggaagagaataagcaactgtgttgcagactatagcgtgctttacaattccgcatcctttagtaccttcaaatgttacggtgtgagccccaccaaactcaatgatctctgtttcacaaacgtgtacgcagatagtttcgttatacgcggggacgaagtacggcagatagcccctggccagacaggaaagatagccgattacaactacaaacttccagacgattttacagggtgtgtgatcgcttggaattcaaataacctggactccaaagtgggaggcaactataattacctgtaccgactgttccgcaaaagcaacttgaaacctttcgagcgagatatatcaaccgaaatctaccaagctggttctacaccttgtaatggtgtggagggatttaactgctacttccctcttcagtcctatggatttcagcctacaaatggagtcgggtatcaaccctatagagtcgtggtgttgtcatttgaacttctccatgcacctgctactgtctgtggtccaaaaaagtccactaatcttgtaaaaaacaaa

SEQ ID NO: 239 - protein, 658 aa, synthetic construct
  REGION 1..658: note = Mf_l1_Si_l2_S2
EQAEGVECDFSPLLSGTPPQVYNFKRLVFTNCNYNLTKLLSLFSVNDFTCSQISPAAIASNCYSSLILDYFSYPLSMKSDLSVSSAGPISQFNYKQSFSNPTCLILATVPHNLTTITKPLKYSYINKCSRLLSDDRTEVPQLVNANQYSPCVSIVPSTVWEDGDYYRKQLSPLEGGGWLVASGSTVAMTEQLQMGFGITVQYGTDTNSVCPKLEFANDTKSGGGSGGGSGGGSNITNLCPFGEVFNATKFPSVYAWERKKISNCVADYSVLYNSTFFSTFKCYGVSATKLNDLCFSNVYADSFVVKGDDVRQIAPGQTGVIADYNYKLPDDFMGCVLAWNTRNIDATSTGNYNYKYRYLRHGKLRPFERDISNVPFSPDGKPCTPPALNCYWPLNDYGFYTTTGIGYQPYRVVVLSFELLNAPATVCGPKLSTDLIKNSGGSGGSGGSGGSNITNLCPFGEVFNATRFASVYAWNRKRISNCVADYSVLYNSASFSTFKCYGVSPTKLNDLCFTNVYADSFVIRGDEVRQIAPGQTGKIADYNYKLPDDFTGCVIAWNSNNLDSKVGGNYNYLYRLFRKSNLKPFERDISTEIYQAGSTPCNGVEGFNCYFPLQSYGFQPTNGVGYQPYRVVVLSFELLHAPATVCGPKKSTNLVKNK

SEQ ID NO: 240 - DNA, 1974 bp, synthetic construct
  misc_feature 1..1974: note = Mf_l1_Si_l2_S2
  source 1..1974: mol_type = other DNA
gagcaggcagagggcgtagagtgcgacttctcccccttgctttccgggactccaccccaggtgtataattttaaaaggcttgtctttactaactgcaactacaacttgaccaaacttctgagtctgttttctgttaatgacttcacatgctctcaaatatcacctgccgctatcgctagtaactgttacagctctcttatcttggattatttctcttatcccctctctatgaaatctgatctcagtgtaagtagtgcaggacccatttcccagtttaattacaaacaatcattctcaaatccaacatgcttgatactggctactgtccctcataacctgaccacaatcactaaaccactcaagtattcatacatcaacaagtgttcccgcctcctgtcagacgatcgaacagaggtccctcagttggtaaacgctaatcaatattcaccatgcgtgagcattgtcccaagcaccgtctgggaagatggggattactataggaaacagttgtcacctcttgagggagggggctggttggtcgcatccggtagcacagtggctatgactgaacagctgcaaatgggtttcggcataaccgtgcagtatgggaccgatacaaactccgtgtgtccaaaattggaatttgctaacgacacaaaatctgggggaggaagtggagggggtagtggtggaggaagtaacataaccaacttgtgccccttcggggaggtattcaacgccaccaagttccccagtgtatatgcctgggagcggaaaaagatttctaattgcgttgctgattatagcgtactgtacaatagtacatttttttcaaccttcaaatgctacggtgttagcgccactaagctcaatgacttgtgcttttcaaatgtgtacgctgacagctttgttgtaaaaggcgacgatgtccgacagatagcacctggacaaactggtgtgattgcagattacaattacaaattgcccgacgattttatggggtgtgtgctcgcatggaatacccggaacattgatgctacctcaacaggaaactataactacaagtatcgatacttgcgacacgggaaactgaggccatttgagcgtgacatatcaaatgtgccattttcccccgacggaaaaccatgtactcctcccgctctgaattgctactggcccctgaacgattacggattctatactactaccggcattggctatcaaccttacagggttgtagtccttagctttgagttgctcaacgctcctgcaaccgtatgtgggccaaagctctcaactgatctcatcaaaaatagcggcggatcagggggtagcggcggctccggtggctctaatatcactaatctttgccccttcggggaagtatttaacgctactcgatttgctagcgtatatgcctggaaccggaagagaataagcaactgtgttgcagactatagcgtgctttacaattccgcatcctttagtaccttcaaatgttacggtgtgagccccaccaaactcaatgatctctgtttcacaaacgtgtacgcagatagtttcgttatacgcggggacgaagtacggcagatagcccctggccagacaggaaagatagccgattacaactacaaacttccagacgattttacagggtgtgtgatcgcttggaattcaaataacctggactccaaagtgggaggcaactataattacctgtaccgactgttccgcaaaagcaacttgaaacctttcgagcgagatatatcaaccgaaatctaccaagctggttctacaccttgtaatggtgtggagggatttaactgctacttccctcttcagtcctatggatttcagcctacaaatggagtcgggtatcaaccctatagagtcgtggtgttgtcatttgaacttctccatgcacctgctactgtctgtggtccaaaaaagtccactaatcttgtaaaaaacaaa

SEQ ID NO: 241 - protein, 684 aa, synthetic construct
  REGION 1..684: note = Mg_l1_Sh_l2_S2
EGVECDFSPLLSGTPPQVYNFKRLVFTNCNYNLTKLLSLFSVNDFTCSQISPAAIASNCYSSLILDYFSYPLSMKSDLSVSSAGPISQFNYKQSFSNPTCLILATVPHNLTTITKPLKYSYINKCSRLLSDDRTEVPQLVNANQYSPCVSIVPSTVWEDGDYYRKQLSPLEGGGWLVASGSTVAMTEQLQMGFGITVQYGTDTNSVCPKLEFANDTKSGGGSGGGSGGGSRVVPSGDVVRFPNITNLCPFGEVFNATKFPSVYAWERKKISNCVADYSVLYNSTFFSTFKCYGVSATKLNDLCFSNVYADSFVVKGDDVRQIAPGQTGVIADYNYKLPDDFMGCVLAWNTRNIDATSTGNYNYKYRYLRHGKLRPFERDISNVPFSPDGKPCTPPALNCYWPLNDYGFYTTTGIGYQPYRVVVLSFELLNAPATVCGPKLSTDLIKNQCVNFNFNGLTGTGVLTSGGSGGSGGSGGSNITNLCPFGEVFNATRFASVYAWNRKRISNCVADYSVLYNSASFSTFKCYGVSPTKLNDLCFTNVYADSFVIRGDEVRQIAPGQTGKIADYNYKLPDDFTGCVIAWNSNNLDSKVGGNYNYLYRLFRKSNLKPFERDISTEIYQAGSTPCNGVEGFNCYFPLQSYGFQPTNGVGYQPYRVVVLSFELLHAPATVCGPKKSTNLVKNK

SEQ ID NO: 242 - DNA, 2052 bp, synthetic construct
  misc_feature 1..2052: note = Mg_l1_Sh_l2_S2
  source 1..2052: mol_type = other DNA
gagggcgtagagtgcgacttctcccccttgctttccgggactccaccccaggtgtataattttaaaaggcttgtctttactaactgcaactacaacttgaccaaacttctgagtctgttttctgttaatgacttcacatgctctcaaatatcacctgccgctatcgctagtaactgttacagctctcttatcttggattatttctcttatcccctctctatgaaatctgatctcagtgtaagtagtgcaggacccatttcccagtttaattacaaacaatcattctcaaatccaacatgcttgatactggctactgtccctcataacctgaccacaatcactaaaccactcaagtattcatacatcaacaagtgttcccgcctcctgtcagacgatcgaacagaggtccctcagttggtaaacgctaatcaatattcaccatgcgtgagcattgtcccaagcaccgtctgggaagatggggattactataggaaacagttgtcacctcttgagggagggggctggttggtcgcatccggtagcacagtggctatgactgaacagctgcaaatgggtttcggcataaccgtgcagtatgggaccgatacaaactccgtgtgtccaaaattggaatttgctaacgacacaaaatctgggggaggaagtggagggggtagtggtggaggaagtagggtagttccctcaggcgatgtagttagatttccaaacataaccaacttgtgccccttcggggaggtattcaacgccaccaagttccccagtgtatatgcctgggagcggaaaaagatttctaattgcgttgctgattatagcgtactgtacaatagtacatttttttcaaccttcaaatgctacggtgttagcgccactaagctcaatgacttgtgcttttcaaatgtgtacgctgacagctttgttgtaaaaggcgacgatgtccgacagatagcacctggacaaactggtgtgattgcagattacaattacaaattgcccgacgattttatggggtgtgtgctcgcatggaatacccggaacattgatgctacctcaacaggaaactataactacaagtatcgatacttgcgacacgggaaactgaggccatttgagcgtgacatatcaaatgtgccattttcccccgacggaaaaccatgtactcctcccgctctgaattgctactggcccctgaacgattacggattctatactactaccggcattggctatcaaccttacagggttgtagtccttagctttgagttgctcaacgctcctgcaaccgtatgtgggccaaagctctcaactgatctcatcaaaaatcagtgcgtcaattttaactttaatggcctgacaggtactggtgttcttactagcggcggatcagggggtagcggcggctccggtggctctaatatcactaatctttgccccttcggggaagtatttaacgctactcgatttgctagcgtatatgcctggaaccggaagagaataagcaactgtgttgcagactatagcgtgctttacaattccgcatcctttagtaccttcaaatgttacggtgtgagccccaccaaactcaatgatctctgtttcacaaacgtgtacgcagatagtttcgttatacgcggggacgaagtacggcagatagcccctggccagacaggaaagatagccgattacaactacaaacttccagacgattttacagggtgtgtgatcgcttggaattcaaataacctggactccaaagtgggaggcaactataattacctgtaccgactgttccgcaaaagcaacttgaaacctttcgagcgagatatatcaaccgaaatctaccaagctggttctacaccttgtaatggtgtggagggatttaactgctacttccctcttcagtcctatggatttcagcctacaaatggagtcgggtatcaaccctatagagtcgtggtgttgtcatttgaacttctccatgcacctgctactgtctgtggtccaaaaaagtccactaatcttgtaaaaaacaaa

SEQ ID NO: 243 - protein, 655 aa, synthetic construct
  REGION 1..655: note = Mg_l1_Si_l2_S2
EGVECDFSPLLSGTPPQVYNFKRLVFTNCNYNLTKLLSLFSVNDFTCSQISPAAIASNCYSSLILDYFSYPLSMKSDLSVSSAGPISQFNYKQSFSNPTCLILATVPHNLTTITKPLKYSYINKCSRLLSDDRTEVPQLVNANQYSPCVSIVPSTVWEDGDYYRKQLSPLEGGGWLVASGSTVAMTEQLQMGFGITVQYGTDTNSVCPKLEFANDTKSGGGSGGGSGGGSNITNLCPFGEVFNATKFPSVYAWERKKISNCVADYSVLYNSTFFSTFKCYGVSATKLNDLCFSNVYADSFVVKGDDVRQIAPGQTGVIADYNYKLPDDFMGCVLAWNTRNIDATSTGNYNYKYRYLRHGKLRPFERDISNVPFSPDGKPCTPPALNCYWPLNDYGFYTTTGIGYQPYRVVVLSFELLNAPATVCGPKLSTDLIKNSGGSGGSGGSGGSNITNLCPFGEVFNATRFASVYAWNRKRISNCVADYSVLYNSASFSTFKCYGVSPTKLNDLCFTNVYADSFVIRGDEVRQIAPGQTGKIADYNYKLPDDFTGCVIAWNSNNLDSKVGGNYNYLYRLFRKSNLKPFERDISTEIYQAGSTPCNGVEGFNCYFPLQSYGFQPTNGVGYQPYRVVVLSFELLHAPATVCGPKKSTNLVKNK

SEQ ID NO: 244 - DNA, 1965 bp, synthetic construct
  misc_feature 1..1965: note = Mg_l1_Si_l2_S2
  source 1..1965: mol_type = other DNA
gagggcgtagagtgcgacttctcccccttgctttccgggactccaccccaggtgtataattttaaaaggcttgtctttactaactgcaactacaacttgaccaaacttctgagtctgttttctgttaatgacttcacatgctctcaaatatcacctgccgctatcgctagtaactgttacagctctcttatcttggattatttctcttatcccctctctatgaaatctgatctcagtgtaagtagtgcaggacccatttcccagtttaattacaaacaatcattctcaaatccaacatgcttgatactggctactgtccctcataacctgaccacaatcactaaaccactcaagtattcatacatcaacaagtgttcccgcctcctgtcagacgatcgaacagaggtccctcagttggtaaacgctaatcaatattcaccatgcgtgagcattgtcccaagcaccgtctgggaagatggggattactataggaaacagttgtcacctcttgagggagggggctggttggtcgcatccggtagcacagtggctatgactgaacagctgcaaatgggtttcggcataaccgtgcagtatgggaccgatacaaactccgtgtgtccaaaattggaatttgctaacgacacaaaatctgggggaggaagtggagggggtagtggtggaggaagtaacataaccaacttgtgccccttcggggaggtattcaacgccaccaagttccccagtgtatatgcctgggagcggaaaaagatttctaattgcgttgctgattatagcgtactgtacaatagtacatttttttcaaccttcaaatgctacggtgttagcgccactaagctcaatgacttgtgcttttcaaatgtgtacgctgacagctttgttgtaaaaggcgacgatgtccgacagatagcacctggacaaactggtgtgattgcagattacaattacaaattgcccgacgattttatggggtgtgtgctcgcatggaatacccggaacattgatgctacctcaacaggaaactataactacaagtatcgatacttgcgacacgggaaactgaggccatttgagcgtgacatatcaaatgtgccattttcccccgacggaaaaccatgtactcctcccgctctgaattgctactggcccctgaacgattacggattctatactactaccggcattggctatcaaccttacagggttgtagtccttagctttgagttgctcaacgctcctgcaaccgtatgtgggccaaagctctcaactgatctcatcaaaaatagcggcggatcagggggtagcggcggctccggtggctctaatatcactaatctttgccccttcggggaagtatttaacgctactcgatttgctagcgtatatgcctggaaccggaagagaataagcaactgtgttgcagactatagcgtgctttacaattccgcatcctttagtaccttcaaatgttacggtgtgagccccaccaaactcaatgatctctgtttcacaaacgtgtacgcagatagtttcgttatacgcggggacgaagtacggcagatagcccctggccagacaggaaagatagccgattacaactacaaacttccagacgattttacagggtgtgtgatcgcttggaattcaaataacctggactccaaagtgggaggcaactataattacctgtaccgactgttccgcaaaagcaacttgaaacctttcgagcgagatatatcaaccgaaatctaccaagctggttctacaccttgtaatggtgtggagggatttaactgctacttccctcttcagtcctatggatttcagcctacaaatggagtcgggtatcaaccctatagagtcgtggtgttgtcatttgaacttctccatgcacctgctactgtctgtggtccaaaaaagtccactaatcttgtaaaaaacaaa

SEQ ID NO: 245 - protein, 48 aa, synthetic construct
RVQPTESIVRFPNITNLCPFGEVFNATRFASVYAWNRKRISNCVADYS

SEQ ID NO: 246 - protein, 47 aa, synthetic construct
VQPTESIVRFPNITNLCPFGEVFNATRFASVYAWNRKRISNCVADYS

SEQ ID NO: 247 - protein, 46 aa, synthetic construct
QPTESIVRFPNITNLCPFGEVFNATRFASVYAWNRKRISNCVADYS

SEQ ID NO: 248 - protein, 45 aa, synthetic construct
PTESIVRFPNITNLCPFGEVFNATRFASVYAWNRKRISNCVADYS

SEQ ID NO: 249 - protein, 44 aa, synthetic construct
TESIVRFPNITNLCPFGEVFNATRFASVYAWNRKRISNCVADYS

SEQ ID NO: 250 - protein, 43 aa, synthetic construct
ESIVRFPNITNLCPFGEVFNATRFASVYAWNRKRISNCVADYS

SEQ ID NO: 251 - protein, 42 aa, synthetic construct
SIVRFPNITNLCPFGEVFNATRFASVYAWNRKRISNCVADYS

SEQ ID NO: 252 - protein, 41 aa, synthetic construct
IVRFPNITNLCPFGEVFNATRFASVYAWNRKRISNCVADYS

SEQ ID NO: 253 - protein, 40 aa, synthetic construct
VRFPNITNLCPFGEVFNATRFASVYAWNRKRISNCVADYS

SEQ ID NO: 254 - protein, 39 aa, synthetic construct
RFPNITNLCPFGEVFNATRFASVYAWNRKRISNCVADYS

SEQ ID NO: 255 - protein, 38 aa, synthetic construct
FPNITNLCPFGEVFNATRFASVYAWNRKRISNCVADYS

SEQ ID NO: 256 - protein, 37 aa, synthetic construct
PNITNLCPFGEVFNATRFASVYAWNRKRISNCVADYS

SEQ ID NO: 257 - protein, 36 aa, synthetic construct
NITNLCPFGEVFNATRFASVYAWNRKRISNCVADYS

SEQ ID NO: 258 - protein, 35 aa, synthetic construct
ITNLCPFGEVFNATRFASVYAWNRKRISNCVADYS

SEQ ID NO: 259 - protein, 34 aa, synthetic construct
TNLCPFGEVFNATRFASVYAWNRKRISNCVADYS

SEQ ID NO: 260 - protein, 33 aa, synthetic construct
NLCPFGEVFNATRFASVYAWNRKRISNCVADYS

SEQ ID NO: 261 - protein, 32 aa, synthetic construct
LCPFGEVFNATRFASVYAWNRKRISNCVADYS

SEQ ID NO: 262 - protein, 31 aa, synthetic construct
CPFGEVFNATRFASVYAWNRKRISNCVADYS

SEQ ID NO: 263 - protein, 30 aa, synthetic construct
PFGEVFNATRFASVYAWNRKRISNCVADYS

SEQ ID NO: 264 - protein, 29 aa, synthetic construct
FGEVFNATRFASVYAWNRKRISNCVADYS

SEQ ID NO: 265 - protein, 28 aa, synthetic construct
GEVFNATRFASVYAWNRKRISNCVADYS

SEQ ID NO: 266 - protein, 27 aa, synthetic construct
EVFNATRFASVYAWNRKRISNCVADYS

SEQ ID NO: 267 - protein, 26 aa, synthetic construct
VFNATRFASVYAWNRKRISNCVADYS

SEQ ID NO: 268 - protein, 25 aa, synthetic construct
FNATRFASVYAWNRKRISNCVADYS

SEQ ID NO: 269 - protein, 24 aa, synthetic construct
NATRFASVYAWNRKRISNCVADYS

SEQ ID NO: 270 - protein, 23 aa, synthetic construct
ATRFASVYAWNRKRISNCVADYS

SEQ ID NO: 271 - protein, 22 aa, synthetic construct
TRFASVYAWNRKRISNCVADYS

SEQ ID NO: 272 - protein, 21 aa, synthetic construct
RFASVYAWNRKRISNCVADYS

SEQ ID NO: 273 - protein, 20 aa, synthetic construct
FASVYAWNRKRISNCVADYS

SEQ ID NO: 274 - protein, 19 aa, synthetic construct
ASVYAWNRKRISNCVADYS

SEQ ID NO: 275 - protein, 18 aa, synthetic construct
SVYAWNRKRISNCVADYS

SEQ ID NO: 276 - protein, 17 aa, synthetic construct
VYAWNRKRISNCVADYS

SEQ ID NO: 277 - protein, 16 aa, synthetic construct
YAWNRKRISNCVADYS

SEQ ID NO: 278 - protein, 15 aa, synthetic construct
AWNRKRISNCVADYS

SEQ ID NO: 279 - protein, 14 aa, synthetic construct
WNRKRISNCVADYS

SEQ ID NO: 280 - protein, 13 aa, synthetic construct
NRKRISNCVADYS

SEQ ID NO: 281 - protein, 12 aa, synthetic construct
RKRISNCVADYS

SEQ ID NO: 282 - protein, 11 aa, synthetic construct
KRISNCVADYS

SEQ ID NO: 283 - protein, 10 aa, synthetic construct
RISNCVADYS

SEQ ID NO: 284 - protein, 9 aa, synthetic construct
ISNCVADYS

SEQ ID NO: 285 - protein, 8 aa, synthetic construct
SNCVADYS

SEQ ID NO: 286 - protein, 7 aa, synthetic construct
NCVADYS

SEQ ID NO: 287 - protein, 6 aa, synthetic construct
CVADYS

SEQ ID NO: 288 - protein, 5 aa, synthetic construct
VADYS

SEQ ID NO: 289 - protein, 4 aa, synthetic construct
ADYS

SEQ ID NO: 290-292 - skipped (3 entries)

SEQ ID NO: 293 - protein, 48 aa, synthetic construct
RVQPTESIVRFPNITNLCPFDEVFNATRFASVYAWNRKRISNCVADYS

SEQ ID NO: 294 - protein, 47 aa, synthetic construct
VQPTESIVRFPNITNLCPFDEVFNATRFASVYAWNRKRISNCVADYS

SEQ ID NO: 295 - protein, 46 aa, synthetic construct
QPTESIVRFPNITNLCPFDEVFNATRFASVYAWNRKRISNCVADYS

SEQ ID NO: 296 - protein, 45 aa, synthetic construct
PTESIVRFPNITNLCPFDEVFNATRFASVYAWNRKRISNCVADYS

SEQ ID NO: 297 - protein, 44 aa, synthetic construct
TESIVRFPNITNLCPFDEVFNATRFASVYAWNRKRISNCVADYS

SEQ ID NO: 298 - protein, 43 aa, synthetic construct
ESIVRFPNITNLCPFDEVFNATRFASVYAWNRKRISNCVADYS

SEQ ID NO: 299 - protein, 42 aa, synthetic construct
SIVRFPNITNLCPFDEVFNATRFASVYAWNRKRISNCVADYS

SEQ ID NO: 300 - protein, 41 aa, synthetic construct
IVRFPNITNLCPFDEVFNATRFASVYAWNRKRISNCVADYS

SEQ ID NO: 301 - protein, 40 aa, synthetic construct
VRFPNITNLCPFDEVFNATRFASVYAWNRKRISNCVADYS

SEQ ID NO: 302 - protein, 39 aa, synthetic construct
RFPNITNLCPFDEVFNATRFASVYAWNRKRISNCVADYS

SEQ ID NO: 303 - protein, 38 aa, synthetic construct
FPNITNLCPFDEVFNATRFASVYAWNRKRISNCVADYS

SEQ ID NO: 304 - protein, 37 aa, synthetic construct
PNITNLCPFDEVFNATRFASVYAWNRKRISNCVADYS

SEQ ID NO: 305 - protein, 36 aa, synthetic construct
NITNLCPFDEVFNATRFASVYAWNRKRISNCVADYS

SEQ ID NO: 306 - protein, 35 aa, synthetic construct
ITNLCPFDEVFNATRFASVYAWNRKRISNCVADYS

SEQ ID NO: 307 - protein, 34 aa, synthetic construct
TNLCPFDEVFNATRFASVYAWNRKRISNCVADYS

SEQ ID NO: 308 - protein, 33 aa, synthetic construct
NLCPFDEVFNATRFASVYAWNRKRISNCVADYS

SEQ ID NO: 309 - protein, 32 aa, synthetic construct
LCPFDEVFNATRFASVYAWNRKRISNCVADYS

SEQ ID NO: 310 - protein, 31 aa, synthetic construct
CPFDEVFNATRFASVYAWNRKRISNCVADYS

SEQ ID NO: 311 - protein, 30 aa, synthetic construct
PFDEVFNATRFASVYAWNRKRISNCVADYS

SEQ ID NO: 312 - protein, 29 aa, synthetic construct
FDEVFNATRFASVYAWNRKRISNCVADYS

SEQ ID NO: 313 - protein, 28 aa, synthetic construct
DEVFNATRFASVYAWNRKRISNCVADYS

SEQ ID NO: 314 - protein, 48 aa, synthetic construct
RVQPTESIVRFPNITNLCPFGEVFNATKFASVYAWNRKRISNCVADYS

SEQ ID NO: 315 - protein, 47 aa, synthetic construct
VQPTESIVRFPNITNLCPFGEVFNATKFASVYAWNRKRISNCVADYS

SEQ ID NO: 316 - protein, 46 aa, synthetic construct
QPTESIVRFPNITNLCPFGEVFNATKFASVYAWNRKRISNCVADYS

SEQ ID NO: 317 - protein, 45 aa, synthetic construct
PTESIVRFPNITNLCPFGEVFNATKFASVYAWNRKRISNCVADYS

SEQ ID NO: 318 - protein, 44 aa, synthetic construct
TESIVRFPNITNLCPFGEVFNATKFASVYAWNRKRISNCVADYS

SEQ ID NO: 319 - protein, 43 aa, synthetic construct
ESIVRFPNITNLCPFGEVFNATKFASVYAWNRKRISNCVADYS

SEQ ID NO: 320 - protein, 42 aa, synthetic construct
SIVRFPNITNLCPFGEVFNATKFASVYAWNRKRISNCVADYS

SEQ ID NO: 321 - protein, 41 aa, synthetic construct
IVRFPNITNLCPFGEVFNATKFASVYAWNRKRISNCVADYS

SEQ ID NO: 322 - protein, 40 aa, synthetic construct
VRFPNITNLCPFGEVFNATKFASVYAWNRKRISNCVADYS

SEQ ID NO: 323 - protein, 39 aa, synthetic construct
RFPNITNLCPFGEVFNATKFASVYAWNRKRISNCVADYS

SEQ ID NO: 324 - protein, 38 aa, synthetic construct
FPNITNLCPFGEVFNATKFASVYAWNRKRISNCVADYS

SEQ ID NO: 325 - protein, 37 aa, synthetic construct
PNITNLCPFGEVFNATKFASVYAWNRKRISNCVADYS

SEQ ID NO: 326 - protein, 36 aa, synthetic construct
NITNLCPFGEVFNATKFASVYAWNRKRISNCVADYS

SEQ ID NO: 327 - protein, 35 aa, synthetic construct
ITNLCPFGEVFNATKFASVYAWNRKRISNCVADYS

SEQ ID NO: 328 - protein, 34 aa, synthetic construct
TNLCPFGEVFNATKFASVYAWNRKRISNCVADYS

SEQ ID NO: 329 - protein, 33 aa, synthetic construct
NLCPFGEVFNATKFASVYAWNRKRISNCVADYS

SEQ ID NO: 330 - protein, 32 aa, synthetic construct
LCPFGEVFNATKFASVYAWNRKRISNCVADYS

SEQ ID NO: 331 - protein, 31 aa, synthetic construct
CPFGEVFNATKFASVYAWNRKRISNCVADYS

SEQ ID NO: 332 - protein, 30 aa, synthetic construct
PFGEVFNATKFASVYAWNRKRISNCVADYS

SEQ ID NO: 333 - protein, 29 aa, synthetic construct
FGEVFNATKFASVYAWNRKRISNCVADYS

SEQ ID NO: 334 - protein, 28 aa, synthetic construct
GEVFNATKFASVYAWNRKRISNCVADYS

SEQ ID NO: 335 - protein, 27 aa, synthetic construct
EVFNATKFASVYAWNRKRISNCVADYS

SEQ ID NO: 336 - protein, 26 aa, synthetic construct
VFNATKFASVYAWNRKRISNCVADYS

SEQ ID NO: 337 - protein, 25 aa, synthetic construct
FNATKFASVYAWNRKRISNCVADYS

SEQ ID NO: 338 - protein, 24 aa, synthetic construct
NATKFASVYAWNRKRISNCVADYS

SEQ ID NO: 339 - protein, 23 aa, synthetic construct
ATKFASVYAWNRKRISNCVADYS

SEQ ID NO: 340 - protein, 22 aa, synthetic construct
TKFASVYAWNRKRISNCVADYS

SEQ ID NO: 341 - protein, 21 aa, synthetic construct
KFASVYAWNRKRISNCVADYS

SEQ ID NO: 342 - protein, 48 aa, synthetic construct
RVQPTESIVRFPNITNLCPFDEVFNATKFASVYAWNRKRISNCVADYS

SEQ ID NO: 343 - protein, 47 aa, synthetic construct
VQPTESIVRFPNITNLCPFDEVFNATKFASVYAWNRKRISNCVADYS

SEQ ID NO: 344 - protein, 46 aa, synthetic construct
QPTESIVRFPNITNLCPFDEVFNATKFASVYAWNRKRISNCVADYS

SEQ ID NO: 345 - protein, 45 aa, synthetic construct
PTESIVRFPNITNLCPFDEVFNATKFASVYAWNRKRISNCVADYS

SEQ ID NO: 346 - protein, 44 aa, synthetic construct
TESIVRFPNITNLCPFDEVFNATKFASVYAWNRKRISNCVADYS

SEQ ID NO: 347 - protein, 43 aa, synthetic construct
ESIVRFPNITNLCPFDEVFNATKFASVYAWNRKRISNCVADYS

SEQ ID NO: 348 - protein, 42 aa, synthetic construct
SIVRFPNITNLCPFDEVFNATKFASVYAWNRKRISNCVADYS

SEQ ID NO: 349 - protein, 41 aa, synthetic construct
IVRFPNITNLCPFDEVFNATKFASVYAWNRKRISNCVADYS

SEQ ID NO: 350 - protein, 40 aa, synthetic construct
VRFPNITNLCPFDEVFNATKFASVYAWNRKRISNCVADYS

SEQ ID NO: 351 - protein, 39 aa, synthetic construct
RFPNITNLCPFDEVFNATKFASVYAWNRKRISNCVADYS

SEQ ID NO: 352 - protein, 38 aa, synthetic construct
FPNITNLCPFDEVFNATKFASVYAWNRKRISNCVADYS

SEQ ID NO: 353 - protein, 37 aa, synthetic construct
PNITNLCPFDEVFNATKFASVYAWNRKRISNCVADYS

SEQ ID NO: 354 - protein, 36 aa, synthetic construct
NITNLCPFDEVFNATKFASVYAWNRKRISNCVADYS

SEQ ID NO: 355 - protein, 35 aa, synthetic construct
ITNLCPFDEVFNATKFASVYAWNRKRISNCVADYS

SEQ ID NO: 356 - protein, 34 aa, synthetic construct
TNLCPFDEVFNATKFASVYAWNRKRISNCVADYS

SEQ ID NO: 357 - protein, 33 aa, synthetic construct
NLCPFDEVFNATKFASVYAWNRKRISNCVADYS

SEQ ID NO: 358 - protein, 32 aa, synthetic construct
LCPFDEVFNATKFASVYAWNRKRISNCVADYS

SEQ ID NO: 359 - protein, 31 aa, synthetic construct
CPFDEVFNATKFASVYAWNRKRISNCVADYS

SEQ ID NO: 360 - protein, 30 aa, synthetic construct
PFDEVFNATKFASVYAWNRKRISNCVADYS

SEQ ID NO: 361 - protein, 29 aa, synthetic construct
FDEVFNATKFASVYAWNRKRISNCVADYS

SEQ ID NO: 362 - protein, 28 aa, synthetic construct
DEVFNATKFASVYAWNRKRISNCVADYS

SEQ ID NO: 363 - protein, 39 aa, synthetic construct
STNLVKNKCVNFNFNGLTGTGVLTESNKKFLPFQQFGRD

SEQ ID NO: 364 - protein, 38 aa, synthetic construct
STNLVKNKCVNFNFNGLTGTGVLTESNKKFLPFQQFGR

SEQ ID NO: 365 - protein, 37 aa, synthetic construct
STNLVKNKCVNFNFNGLTGTGVLTESNKKFLPFQQFG

SEQ ID NO: 366 - protein, 36 aa, synthetic construct
STNLVKNKCVNFNFNGLTGTGVLTESNKKFLPFQQF

SEQ ID NO: 367 - protein, 35 aa, synthetic construct
STNLVKNKCVNFNFNGLTGTGVLTESNKKFLPFQQ

SEQ ID NO: 368 - protein, 34 aa, synthetic construct
STNLVKNKCVNFNFNGLTGTGVLTESNKKFLPFQ

SEQ ID NO: 369 - protein, 33 aa, synthetic construct
STNLVKNKCVNFNFNGLTGTGVLTESNKKFLPF

SEQ ID NO: 370 - protein, 32 aa, synthetic construct
STNLVKNKCVNFNFNGLTGTGVLTESNKKFLP

SEQ ID NO: 371 - protein, 31 aa, synthetic construct
STNLVKNKCVNFNFNGLTGTGVLTESNKKFL

SEQ ID NO: 372 - protein, 30 aa, synthetic construct
STNLVKNKCVNFNFNGLTGTGVLTESNKKF

SEQ ID NO: 373 - protein, 29 aa, synthetic construct
STNLVKNKCVNFNFNGLTGTGVLTESNKK

SEQ ID NO: 374 - protein, 28 aa, synthetic construct
STNLVKNKCVNFNFNGLTGTGVLTESNK

SEQ ID NO: 375 - protein, 27 aa, synthetic construct
STNLVKNKCVNFNFNGLTGTGVLTESN

SEQ ID NO: 376 - protein, 26 aa, synthetic construct
STNLVKNKCVNFNFNGLTGTGVLTES

SEQ ID NO: 377 - protein, 25 aa, synthetic construct
STNLVKNKCVNFNFNGLTGTGVLTE

SEQ ID NO: 378 - protein, 24 aa, synthetic construct
STNLVKNKCVNFNFNGLTGTGVLT

SEQ ID NO: 379 - protein, 23 aa, synthetic construct
STNLVKNKCVNFNFNGLTGTGVL

SEQ ID NO: 380 - protein, 22 aa, synthetic construct
STNLVKNKCVNFNFNGLTGTGV

SEQ ID NO: 381 - protein, 21 aa, synthetic construct
STNLVKNKCVNFNFNGLTGTG

SEQ ID NO: 382 - protein, 20 aa, synthetic construct
STNLVKNKCVNFNFNGLTGT

SEQ ID NO: 383 - protein, 19 aa, synthetic construct
STNLVKNKCVNFNFNGLTG

SEQ ID NO: 384 - protein, 18 aa, synthetic construct
STNLVKNKCVNFNFNGLT

SEQ ID NO: 385 - protein, 17 aa, synthetic construct
STNLVKNKCVNFNFNGL

SEQ ID NO: 386 - protein, 16 aa, synthetic construct
STNLVKNKCVNFNFNG

SEQ ID NO: 387 - protein, 15 aa, synthetic construct
STNLVKNKCVNFNFN

SEQ ID NO: 388 - protein, 14 aa, synthetic construct
STNLVKNKCVNFNF

SEQ ID NO: 389 - protein, 13 aa, synthetic construct
STNLVKNKCVNFN

SEQ ID NO: 390 - protein, 12 aa, synthetic construct
STNLVKNKCVNF

SEQ ID NO: 391 - protein, 11 aa, synthetic construct
STNLVKNKCVN

SEQ ID NO: 392 - protein, 10 aa, synthetic construct
STNLVKNKCV

SEQ ID NO: 393 - protein, 9 aa, synthetic construct
STNLVKNKC

SEQ ID NO: 394 - protein, 8 aa, synthetic construct
STNLVKNK

SEQ ID NO: 395 - protein, 7 aa, synthetic construct
STNLVKN

SEQ ID NO: 396 - protein, 6 aa, synthetic construct
STNLVK

SEQ ID NO: 397 - protein, 5 aa, synthetic construct
STNLV

SEQ ID NO: 398 - protein, 4 aa, synthetic construct
STNL

SEQ ID NO: 399-401 - skipped (3 entries)

SEQ ID NO: 402 - protein, 39 aa, synthetic construct
STNLVKNKCVNFNFNGLKGTGVLTESNKKFLPFQQFGRD

SEQ ID NO: 403 - protein, 38 aa, synthetic construct
STNLVKNKCVNFNFNGLKGTGVLTESNKKFLPFQQFGR

SEQ ID NO: 404 - protein, 37 aa, synthetic construct
STNLVKNKCVNFNFNGLKGTGVLTESNKKFLPFQQFG

SEQ ID NO: 405 - protein, 36 aa, synthetic construct
STNLVKNKCVNFNFNGLKGTGVLTESNKKFLPFQQF

SEQ ID NO: 406 - protein, 35 aa, synthetic construct
STNLVKNKCVNFNFNGLKGTGVLTESNKKFLPFQQ

SEQ ID NO: 407 - protein, 34 aa, synthetic construct
STNLVKNKCVNFNFNGLKGTGVLTESNKKFLPFQ

SEQ ID NO: 408 - protein, 33 aa, synthetic construct
STNLVKNKCVNFNFNGLKGTGVLTESNKKFLPF

SEQ ID NO: 409 - protein, 32 aa, synthetic construct
STNLVKNKCVNFNFNGLKGTGVLTESNKKFLP

SEQ ID NO: 410 - protein, 31 aa, synthetic construct
STNLVKNKCVNFNFNGLKGTGVLTESNKKFL

SEQ ID NO: 411 - protein, 30 aa, synthetic construct
STNLVKNKCVNFNFNGLKGTGVLTESNKKF

SEQ ID NO: 412 - protein, 29 aa, synthetic construct
STNLVKNKCVNFNFNGLKGTGVLTESNKK

SEQ ID NO: 413 - protein, 28 aa, synthetic construct
STNLVKNKCVNFNFNGLKGTGVLTESNK

SEQ ID NO: 414 - protein, 27 aa, synthetic construct
STNLVKNKCVNFNFNGLKGTGVLTESN

SEQ ID NO: 415 - protein, 26 aa, synthetic construct
STNLVKNKCVNFNFNGLKGTGVLTES

SEQ ID NO: 416 - protein, 25 aa, synthetic construct
STNLVKNKCVNFNFNGLKGTGVLTE

SEQ ID NO: 417 - protein, 24 aa, synthetic construct
STNLVKNKCVNFNFNGLKGTGVLT

SEQ ID NO: 418 - protein, 23 aa, synthetic construct
STNLVKNKCVNFNFNGLKGTGVL

SEQ ID NO: 419 - protein, 22 aa, synthetic construct
STNLVKNKCVNFNFNGLKGTGV

SEQ ID NO: 420 - protein, 21 aa, synthetic construct
STNLVKNKCVNFNFNGLKGTG

SEQ ID NO: 421 - protein, 20 aa, synthetic construct
STNLVKNKCVNFNFNGLKGT

SEQ ID NO: 422 - protein, 19 aa, synthetic construct
STNLVKNKCVNFNFNGLKG

SEQ ID NO: 423 - protein, 18 aa, synthetic construct
STNLVKNKCVNFNFNGLK

SEQ ID NO: 424 - DNA, 144 bp, synthetic construct
  source 1..144: mol_type = other DNA
agggttcagcccaccgaatcaatagtacggttcccaaatatcactaatctttgccccttcggggaagtatttaacgctactcgatttgctagcgtatatgcctggaaccggaagagaataagcaactgtgttgcagactatagc

SEQ ID NO: 425 - DNA, 141 bp, synthetic construct
  source 1..141: mol_type = other DNA
gttcagcccaccgaatcaatagtacggttcccaaatatcactaatctttgccccttcggggaagtatttaacgctactcgatttgctagcgtatatgcctggaaccggaagagaataagcaactgtgttgcagactatagc

SEQ ID NO: 426 - DNA, 138 bp, synthetic construct
  source 1..138: mol_type = other DNA
cagcccaccgaatcaatagtacggttcccaaatatcactaatctttgccccttcggggaagtatttaacgctactcgatttgctagcgtatatgcctggaaccggaagagaataagcaactgtgttgcagactatagc

SEQ ID NO: 427 - DNA, 135 bp, synthetic construct
  source 1..135: mol_type = other DNA
cccaccgaatcaatagtacggttcccaaatatcactaatctttgccccttcggggaagtatttaacgctactcgatttgctagcgtatatgcctggaaccggaagagaataagcaactgtgttgcagactatagc

SEQ ID NO: 428 - DNA, 132 bp, synthetic construct
  source 1..132: mol_type = other DNA
accgaatcaatagtacggttcccaaatatcactaatctttgccccttcggggaagtatttaacgctactcgatttgctagcgtatatgcctggaaccggaagagaataagcaactgtgttgcagactatagc

SEQ ID NO: 429 - DNA, 129 bp, synthetic construct
  source 1..129: mol_type = other DNA
gaatcaatagtacggttcccaaatatcactaatctttgccccttcggggaagtatttaacgctactcgatttgctagcgtatatgcctggaaccggaagagaataagcaactgtgttgcagactatagc

SEQ ID NO: 430 - DNA, 126 bp, synthetic construct
  source 1..126: mol_type = other DNA
tcaatagtacggttcccaaatatcactaatctttgccccttcggggaagtatttaacgctactcgatttgctagcgtatatgcctggaaccggaagagaataagcaactgtgttgcagactatagc

SEQ ID NO: 431 - DNA, 123 bp, synthetic construct
  source 1..123: mol_type = other DNA
atagtacggttcccaaatatcactaatctttgccccttcggggaagtatttaacgctactcgatttgctagcgtatatgcctggaaccggaagagaataagcaactgtgttgcagactatagc

SEQ ID NO: 432 - DNA, 120 bp, synthetic construct
  source 1..120: mol_type = other DNA
gtacggttcccaaatatcactaatctttgccccttcggggaagtatttaacgctactcgatttgctagcgtatatgcctggaaccggaagagaataagcaactgtgttgcagactatagc

SEQ ID NO: 433 - DNA, 117 bp, synthetic construct
  source 1..117: mol_type = other DNA
cggttcccaaatatcactaatctttgccccttcggggaagtatttaacgctactcgatttgctagcgtatatgcctggaaccggaagagaataagcaactgtgttgcagactatagc

SEQ ID NO: 434 - DNA, 114 bp, synthetic construct
  source 1..114: mol_type = other DNA
ttcccaaatatcactaatctttgccccttcggggaagtatttaacgctactcgatttgctagcgtatatgcctggaaccggaagagaataagcaactgtgttgcagactatagc

SEQ ID NO: 435 - DNA, 111 bp, synthetic construct
  source 1..111: mol_type = other DNA
ccaaatatcactaatctttgccccttcggggaagtatttaacgctactcgatttgctagcgtatatgcctggaaccggaagagaataagcaactgtgttgcagactatagc

SEQ ID NO: 436 - DNA, 108 bp, synthetic construct
  source 1..108: mol_type = other DNA
aatatcactaatctttgccccttcggggaagtatttaacgctactcgatttgctagcgtatatgcctggaaccggaagagaataagcaactgtgttgcagactatagc

SEQ ID NO: 437 - DNA, 105 bp, synthetic construct
  source 1..105: mol_type = other DNA
atcactaatctttgccccttcggggaagtatttaacgctactcgatttgctagcgtatatgcctggaaccggaagagaataagcaactgtgttgcagactatagc

SEQ ID NO: 438 - DNA, 102 bp, synthetic construct
  source 1..102: mol_type = other DNA
actaatctttgccccttcggggaagtatttaacgctactcgatttgctagcgtatatgcctggaaccggaagagaataagcaactgtgttgcagactatagc

SEQ ID NO: 439 - DNA, 99 bp, synthetic construct
  source 1..99: mol_type = other DNA
aatctttgccccttcggggaagtatttaacgctactcgatttgctagcgtatatgcctggaaccggaagagaataagcaactgtgttgcagactatagc

SEQ ID NO: 440 - DNA, 96 bp, synthetic construct
  source 1..96: mol_type = other DNA
ctttgccccttcggggaagtatttaacgctactcgatttgctagcgtatatgcctggaaccggaagagaataagcaactgtgttgcagactatagc

SEQ ID NO: 441 - DNA, 93 bp, synthetic construct
  source 1..93: mol_type = other DNA
tgccccttcggggaagtatttaacgctactcgatttgctagcgtatatgcctggaaccggaagagaataagcaactgtgttgcagactatagc

SEQ ID NO: 442 - DNA, 90 bp, synthetic construct
  source 1..90: mol_type = other DNA
cccttcggggaagtatttaacgctactcgatttgctagcgtatatgcctggaaccggaagagaataagcaactgtgttgcagactatagc

SEQ ID NO: 443 - DNA, 87 bp, synthetic construct
  source 1..87: mol_type = other DNA
ttcggggaagtatttaacgctactcgatttgctagcgtatatgcctggaaccggaagagaataagcaactgtgttgcagactatagc

SEQ ID NO: 444 - DNA, 84 bp, synthetic construct
  source 1..84: mol_type = other DNA
ggggaagtatttaacgctactcgatttgctagcgtatatgcctggaaccggaagagaataagcaactgtgttgcagactatagc

SEQ ID NO: 445 - DNA, 81 bp, synthetic construct
  source 1..81: mol_type = other DNA
gaagtatttaacgctactcgatttgctagcgtatatgcctggaaccggaagagaataagcaactgtgttgcagactatagc

SEQ ID NO: 446 - DNA, 78 bp, synthetic construct
  source 1..78: mol_type = other DNA
gtatttaacgctactcgatttgctagcgtatatgcctggaaccggaagagaataagcaactgtgttgcagactatagc

SEQ ID NO: 447 - DNA, 75 bp, synthetic construct
  source 1..75: mol_type = other DNA
tttaacgctactcgatttgctagcgtatatgcctggaaccggaagagaataagcaactgtgttgcagactatagc

SEQ ID NO: 448 - DNA, 72 bp, synthetic construct
  source 1..72: mol_type = other DNA
aacgctactcgatttgctagcgtatatgcctggaaccggaagagaataagcaactgtgttgcagactatagc

SEQ ID NO: 449 - DNA, 69 bp, synthetic construct
  source 1..69: mol_type = other DNA
gctactcgatttgctagcgtatatgcctggaaccggaagagaataagcaactgtgttgcagactatagc

SEQ ID NO: 450 - DNA, 66 bp, synthetic construct
  source 1..66: mol_type = other DNA
actcgatttgctagcgtatatgcctggaaccggaagagaataagcaactgtgttgcagactatagc

SEQ ID NO: 451 - DNA, 63 bp, synthetic construct
  source 1..63: mol_type = other DNA
cgatttgctagcgtatatgcctggaaccggaagagaataagcaactgtgttgcagactatagc

SEQ ID NO: 452 - DNA, 60 bp, synthetic construct
  source 1..60: mol_type = other DNA
tttgctagcgtatatgcctggaaccggaagagaataagcaactgtgttgcagactatagc

SEQ ID NO: 453 - DNA, 57 bp, synthetic construct
  source 1..57: mol_type = other DNA
gctagcgtatatgcctggaaccggaagagaataagcaactgtgttgcagactatagc

SEQ ID NO: 454 - DNA, 54 bp, synthetic construct
  source 1..54: mol_type = other DNA
agcgtatatgcctggaaccggaagagaataagcaactgtgttgcagactatagc

SEQ ID NO: 455 - DNA, 51 bp, synthetic construct
  source 1..51: mol_type = other DNA
gtatatgcctggaaccggaagagaataagcaactgtgttgcagactatagc

SEQ ID NO: 456 - DNA, 48 bp, synthetic construct
  source 1..48: mol_type = other DNA
tatgcctggaaccggaagagaataagcaactgtgttgcagactatagc

SEQ ID NO: 457 - DNA, 45 bp, synthetic construct
  source 1..45: mol_type = other DNA
gcctggaaccggaagagaataagcaactgtgttgcagactatagc

SEQ ID NO: 458 - DNA, 42 bp, synthetic construct
  source 1..42: mol_type = other DNA
tggaaccggaagagaataagcaactgtgttgcagactatagc

SEQ ID NO: 459 - DNA, 39 bp, synthetic construct
  source 1..39: mol_type = other DNA
aaccggaagagaataagcaactgtgttgcagactatagc

SEQ ID NO: 460 - DNA, 36 bp, synthetic construct
  source 1..36: mol_type = other DNA
cggaagagaataagcaactgtgttgcagactatagc

SEQ ID NO: 461 - DNA, 33 bp, synthetic construct
  source 1..33: mol_type = other DNA
aagagaataagcaactgtgttgcagactatagc

SEQ ID NO: 462 - DNA, 30 bp, synthetic construct
  source 1..30: mol_type = other DNA
agaataagcaactgtgttgcagactatagc

SEQ ID NO: 463 - DNA, 27 bp, synthetic construct
  source 1..27: mol_type = other DNA
ataagcaactgtgttgcagactatagc

SEQ ID NO: 464 - DNA, 24 bp, synthetic construct
  source 1..24: mol_type = other DNA
agcaactgtgttgcagactatagc

SEQ ID NO: 465 - DNA, 21 bp, synthetic construct
  source 1..21: mol_type = other DNA
aactgtgttgcagactatagc

SEQ ID NO: 466 - DNA, 18 bp, synthetic construct
  source 1..18: mol_type = other DNA
tgtgttgcagactatagc

SEQ ID NO: 467 - DNA, 15 bp, synthetic construct
  source 1..15: mol_type = other DNA
gttgcagactatagc

SEQ ID NO: 468 - DNA, 12 bp, synthetic construct
  source 1..12: mol_type = other DNA
gcagactatagc

SEQ ID NO: 469-471 - skipped (3 entries)

SEQ ID NO: 472 - DNA, 144 bp, synthetic construct
  source 1..144: mol_type = other DNA
agggttcagcccaccgaatcaatagtacggttcccaaatatcactaatctttgccccttcgatgaagtatttaacgctactcgatttgctagcgtatatgcctggaaccggaagagaataagcaactgtgttgcagactatagc

SEQ ID NO: 473 - DNA, 141 bp, synthetic construct
  source 1..141: mol_type = other DNA
gttcagcccaccgaatcaatagtacggttcccaaatatcactaatctttgccccttcgatgaagtatttaacgctactcgatttgctagcgtatatgcctggaaccggaagagaataagcaactgtgttgcagactatagc

SEQ ID NO: 474 - DNA, 138 bp, synthetic construct
  source 1..138: mol_type = other DNA
cagcccaccgaatcaatagtacggttcccaaatatcactaatctttgccccttcgatgaagtatttaacgctactcgatttgctagcgtatatgcctggaaccggaagagaataagcaactgtgttgcagactatagc

SEQ ID NO: 475 - DNA, 135 bp, synthetic construct
  source 1..135: mol_type = other DNA
cccaccgaatcaatagtacggttcccaaatatcactaatctttgccccttcgatgaagtatttaacgctactcgatttgctagcgtatatgcctggaaccggaagagaataagcaactgtgttgcagactatagc

SEQ ID NO: 476 - DNA, 132 bp, synthetic construct
  source 1..132: mol_type = other DNA
accgaatcaatagtacggttcccaaatatcactaatctttgccccttcgatgaagtatttaacgctactcgatttgctagcgtatatgcctggaaccggaagagaataagcaactgtgttgcagactatagc

SEQ ID NO: 477 - DNA, 129 bp, synthetic construct
  source 1..129: mol_type = other DNA
gaatcaatagtacggttcccaaatatcactaatctttgccccttcgatgaagtatttaacgctactcgatttgctagcgtatatgcctggaaccggaagagaataagcaactgtgttgcagactatagc

SEQ ID NO: 478 - DNA, 126 bp, synthetic construct
  source 1..126: mol_type = other DNA
tcaatagtacggttcccaaatatcactaatctttgccccttcgatgaagtatttaacgctactcgatttgctagcgtatatgcctggaaccggaagagaataagcaactgtgttgcagactatagc

SEQ ID NO: 479 - DNA, 123 bp, synthetic construct
  source 1..123: mol_type = other DNA
atagtacggttcccaaatatcactaatctttgccccttcgatgaagtatttaacgctactcgatttgctagcgtatatgcctggaaccggaagagaataagcaactgtgttgcagactatagc

SEQ ID NO: 480 - DNA, 120 bp, synthetic construct
  source 1..120: mol_type = other DNA
gtacggttcccaaatatcactaatctttgccccttcgatgaagtatttaacgctactcgatttgctagcgtatatgcctggaaccggaagagaataagcaactgtgttgcagactatagc

SEQ ID NO: 481 - DNA, 117 bp, synthetic construct
  source 1..117: mol_type = other DNA
cggttcccaaatatcactaatctttgccccttcgatgaagtatttaacgctactcgatttgctagcgtatatgcctggaaccggaagagaataagcaactgtgttgcagactatagc

SEQ ID NO: 482 - DNA, 114 bp, synthetic construct
  source 1..114: mol_type = other DNA
ttcccaaatatcactaatctttgccccttcgatgaagtatttaacgctactcgatttgctagcgtatatgcctggaaccggaagagaataagcaactgtgttgcagactatagc

SEQ ID NO: 483 - DNA, 111 bp, synthetic construct
  source 1..111: mol_type = other DNA
ccaaatatcactaatctttgccccttcgatgaagtatttaacgctactcgatttgctagcgtatatgcctggaaccggaagagaataagcaactgtgttgcagactatagc

SEQ ID NO: 484 - DNA, 108 bp, synthetic construct
  source 1..108: mol_type = other DNA
aatatcactaatctttgccccttcgatgaagtatttaacgctactcgatttgctagcgtatatgcctggaaccggaagagaataagcaactgtgttgcagactatagc

SEQ ID NO: 485 - DNA, 105 bp, synthetic construct
  source 1..105: mol_type = other DNA
atcactaatctttgccccttcgatgaagtatttaacgctactcgatttgctagcgtatatgcctggaaccggaagagaataagcaactgtgttgcagactatagc

SEQ ID NO: 486 - DNA, 102 bp, synthetic construct
  source 1..102: mol_type = other DNA
actaatctttgccccttcgatgaagtatttaacgctactcgatttgctagcgtatatgcctggaaccggaagagaataagcaactgtgttgcagactatagc

SEQ ID NO: 487 - DNA, 99 bp, synthetic construct
  source 1..99: mol_type = other DNA
aatctttgccccttcgatgaagtatttaacgctactcgatttgctagcgtatatgcctggaaccggaagagaataagcaactgtgttgcagactatagc

SEQ ID NO: 488 - DNA, 96 bp, synthetic construct
  source 1..96: mol_type = other DNA
ctttgccccttcgatgaagtatttaacgctactcgatttgctagcgtatatgcctggaaccggaagagaataagcaactgtgttgcagactatagc

SEQ ID NO: 489 - DNA, 93 bp, synthetic construct
  source 1..93: mol_type = other DNA
tgccccttcgatgaagtatttaacgctactcgatttgctagcgtatatgcctggaaccggaagagaataagcaactgtgttgcagactatagc

SEQ ID NO: 490 - DNA, 90 bp, synthetic construct
  source 1..90: mol_type = other DNA
cccttcgatgaagtatttaacgctactcgatttgctagcgtatatgcctggaaccggaagagaataagcaactgtgttgcagactatagc

SEQ ID NO: 491 - DNA, 87 bp, synthetic construct
  source 1..87: mol_type = other DNA
ttcgatgaagtatttaacgctactcgatttgctagcgtatatgcctggaaccggaagagaataagcaactgtgttgcagactatagc

SEQ ID NO: 492 - DNA, 84 bp, synthetic construct
  source 1..84: mol_type = other DNA
gatgaagtatttaacgctactcgatttgctagcgtatatgcctggaaccggaagagaataagcaactgtgttgcagactatagc

SEQ ID NO: 493 - DNA, 144 bp, synthetic construct
  source 1..144: mol_type = other DNA
agggttcagcccaccgaatcaatagtacggttcccaaatatcactaatctttgccccttcggggaagtatttaacgctactaaatttgctagcgtatatgcctggaaccggaagagaataagcaactgtgttgcagactatagc

SEQ ID NO: 494 - DNA, 141 bp, synthetic construct
  source 1..141: mol_type = other DNA
gttcagcccaccgaatcaatagtacggttcccaaatatcactaatctttgccccttcggggaagtatttaacgctactaaatttgctagcgtatatgcctggaaccggaagagaataagcaactgtgttgcagactatagc

SEQ ID NO: 495 - DNA, 138 bp, synthetic construct
  source 1..138: mol_type = other DNA
cagcccaccgaatcaatagtacggttcccaaatatcactaatctttgccccttcggggaagtatttaacgctactaaatttgctagcgtatatgcctggaaccggaagagaataagcaactgtgttgcagactatagc

SEQ ID NO: 496 - DNA, 135 bp, synthetic construct
  source 1..135: mol_type = other DNA
cccaccgaatcaatagtacggttcccaaatatcactaatctttgccccttcggggaagtatttaacgctactaaatttgctagcgtatatgcctggaaccggaagagaataagcaactgtgttgcagactatagc

SEQ ID NO: 497 - DNA, 132 bp, synthetic construct
  source 1..132: mol_type = other DNA
accgaatcaatagtacggttcccaaatatcactaatctttgccccttcggggaagtatttaacgctactaaatttgctagcgtatatgcctggaaccggaagagaataagcaactgtgttgcagactatagc

SEQ ID NO: 498 - DNA, 129 bp, synthetic construct
  source 1..129: mol_type = other DNA
gaatcaatagtacggttcccaaatatcactaatctttgccccttcggggaagtatttaacgctactaaatttgctagcgtatatgcctggaaccggaagagaataagcaactgtgttgcagactatagc

SEQ ID NO: 499 - DNA, 126 bp, synthetic construct
  source 1..126: mol_type = other DNA
tcaatagtacggttcccaaatatcactaatctttgccccttcggggaagtatttaacgctactaaatttgctagcgtatatgcctggaaccggaagagaataagcaactgtgttgcagactatagc

SEQ ID NO: 500 - DNA, 123 bp, synthetic construct
  source 1..123: mol_type = other DNA
atagtacggttcccaaatatcactaatctttgccccttcggggaagtatttaacgctactaaatttgctagcgtatatgcctggaaccggaagagaataagcaactgtgttgcagactatagc

SEQ ID NO: 501 - DNA, 120 bp, synthetic construct
  source 1..120: mol_type = other DNA
gtacggttcccaaatatcactaatctttgccccttcggggaagtatttaacgctactaaatttgctagcgtatatgcctggaaccggaagagaataagcaactgtgttgcagactatagc

SEQ ID NO: 502 - DNA, 117 bp, synthetic construct
  source 1..117: mol_type = other DNA
cggttcccaaatatcactaatctttgccccttcggggaagtatttaacgctactaaatttgctagcgtatatgcctggaaccggaagagaataagcaactgtgttgcagactatagc

SEQ ID NO: 503 - DNA, 114 bp, synthetic construct
  source 1..114: mol_type = other DNA
ttcccaaatatcactaatctttgccccttcggggaagtatttaacgctactaaatttgctagcgtatatgcctggaaccggaagagaataagcaactgtgttgcagactatagc

SEQ ID NO: 504 - DNA, 111 bp, synthetic construct
  source 1..111: mol_type = other DNA
ccaaatatcactaatctttgccccttcggggaagtatttaacgctactaaatttgctagcgtatatgcctggaaccggaagagaataagcaactgtgttgcagactatagc

SEQ ID NO: 505 - DNA, 108 bp, synthetic construct
  source 1..108: mol_type = other DNA
aatatcactaatctttgccccttcggggaagtatttaacgctactaaatttgctagcgtatatgcctggaaccggaagagaataagcaactgtgttgcagactatagc

SEQ ID NO: 506 - DNA, 105 bp, synthetic construct
  source 1..105: mol_type = other DNA
atcactaatctttgccccttcggggaagtatttaacgctactaaatttgctagcgtatatgcctggaaccggaagagaataagcaactgtgttgcagactatagc

SEQ ID NO: 507 - DNA, 102 bp, synthetic construct
  source 1..102: mol_type = other DNA
actaatctttgccccttcggggaagtatttaacgctactaaatttgctagcgtatatgcctggaaccggaagagaataagcaactgtgttgcagactatagc

SEQ ID NO: 508 - DNA, 99 bp, synthetic construct
  source 1..99: mol_type = other DNA
aatctttgccccttcggggaagtatttaacgctactaaatttgctagcgtatatgcctggaaccggaagagaataagcaactgtgttgcagactatagc

SEQ ID NO: 509 - DNA, 96 bp, synthetic construct
  source 1..96: mol_type = other DNA
ctttgccccttcggggaagtatttaacgctactaaatttgctagcgtatatgcctggaaccggaagagaataagcaactgtgttgcagactatagc

SEQ ID NO: 510 - DNA, 93 bp, synthetic construct
  source 1..93: mol_type = other DNA
tgccccttcggggaagtatttaacgctactaaatttgctagcgtatatgcctggaaccggaagagaataagcaactgtgttgcagactatagc

SEQ ID NO: 511 - DNA, 90 bp, synthetic construct
  source 1..90: mol_type = other DNA
cccttcggggaagtatttaacgctactaaatttgctagcgtatatgcctggaaccggaagagaataagcaactgtgttgcagactatagc

SEQ ID NO: 512 - DNA, 87 bp, synthetic construct
  source 1..87: mol_type = other DNA
ttcggggaagtatttaacgctactaaatttgctagcgtatatgcctggaaccggaagagaataagcaactgtgttgcagactatagc

SEQ ID NO: 513 - DNA, 84 bp, synthetic construct
  source 1..84: mol_type = other DNA
ggggaagtatttaacgctactaaatttgctagcgtatatgcctggaaccggaagagaataagcaactgtgttgcagactatagc

SEQ ID NO: 514 - DNA, 81 bp, synthetic construct
  source 1..81: mol_type = other DNA
gaagtatttaacgctactaaatttgctagcgtatatgcctggaaccggaagagaataagcaactgtgttgcagactatagc

SEQ ID NO: 515 - DNA, 78 bp, synthetic construct
  source 1..78: mol_type = other DNA
gtatttaacgctactaaatttgctagcgtatatgcctggaaccggaagagaataagcaactgtgttgcagactatagc

SEQ ID NO: 516 - DNA, 75 bp, synthetic construct
  source 1..75: mol_type = other DNA
tttaacgctactaaatttgctagcgtatatgcctggaaccggaagagaataagcaactgtgttgcagactatagc

SEQ ID NO: 517 - DNA, 72 bp, synthetic construct
  source 1..72: mol_type = other DNA
aacgctactaaatttgctagcgtatatgcctggaaccggaagagaataagcaactgtgttgcagactatagc

SEQ ID NO: 518 - DNA, 69 bp, synthetic construct
  source 1..69: mol_type = other DNA
gctactaaatttgctagcgtatatgcctggaaccggaagagaataagcaactgtgttgcagactatagc

SEQ ID NO: 519 - DNA, 66 bp, synthetic construct
  source 1..66: mol_type = other DNA
actaaatttgctagcgtatatgcctggaaccggaagagaataagcaactgtgttgcagactatagc

SEQ ID NO: 520 - DNA, 63 bp, synthetic construct
  source 1..63: mol_type = other DNA
aaatttgctagcgtatatgcctggaaccggaagagaataagcaactgtgttgcagactatagc

SEQ ID NO: 521 - DNA, 144 bp, synthetic construct
  source 1..144: mol_type = other DNA
agggttcagcccaccgaatcaatagtacggttcccaaatatcactaatctttgccccttcgatgaagtatttaacgctactaaatttgctagcgtatatgcctggaaccggaagagaataagcaactgtgttgcagactatagc

SEQ ID NO: 522 - DNA, 141 bp, synthetic construct
  source 1..141: mol_type = other DNA
gttcagcccaccgaatcaatagtacggttcccaaatatcactaatctttgccccttcgatgaagtatttaacgctactaaatttgctagcgtatatgcctggaaccggaagagaataagcaactgtgttgcagactatagc

SEQ ID NO: 523 - DNA, 138 bp, synthetic construct
  source 1..138: mol_type = other DNA
cagcccaccgaatcaatagtacggttcccaaatatcactaatctttgccccttcgatgaagtatttaacgctactaaatttgctagcgtatatgcctggaaccggaagagaataagcaactgtgttgcagactatagc

SEQ ID NO: 524 - DNA, 135 bp, synthetic construct
  source 1..135: mol_type = other DNA
cccaccgaatcaatagtacggttcccaaatatcactaatctttgccccttcgatgaagtatttaacgctactaaatttgctagcgtatatgcctggaaccggaagagaataagcaactgtgttgcagactatagc

SEQ ID NO: 525 - DNA, 132 bp, synthetic construct
  source 1..132: mol_type = other DNA
accgaatcaatagtacggttcccaaatatcactaatctttgccccttcgatgaagtatttaacgctactaaatttgctagcgtatatgcctggaaccggaagagaataagcaactgtgttgcagactatagc

SEQ ID NO: 526 - DNA, 129 bp, synthetic construct
  source 1..129: mol_type = other DNA
gaatcaatagtacggttcccaaatatcactaatctttgccccttcgatgaagtatttaacgctactaaatttgctagcgtatatgcctggaaccggaagagaataagcaactgtgttgcagactatagc

SEQ ID NO: 527 - DNA, 126 bp, synthetic construct
  source 1..126: mol_type = other DNA
tcaatagtacggttcccaaatatcactaatctttgccccttcgatgaagtatttaacgctactaaatttgctagcgtatatgcctggaaccggaagagaataagcaactgtgttgcagactatagc

SEQ ID NO: 528 - DNA, 123 bp, synthetic construct
  source 1..123: mol_type = other DNA
atagtacggttcccaaatatcactaatctttgccccttcgatgaagtatttaacgctactaaatttgctagcgtatatgcctggaaccggaagagaataagcaactgtgttgcagactatagc

SEQ ID NO: 529 - DNA, 120 bp, synthetic construct
  source 1..120: mol_type = other DNA
gtacggttcccaaatatcactaatctttgccccttcgatgaagtatttaacgctactaaatttgctagcgtatatgcctggaaccggaagagaataagcaactgtgttgcagactatagc

SEQ ID NO: 530 - DNA, 117 bp, synthetic construct
  source 1..117: mol_type = other DNA
cggttcccaaatatcactaatctttgccccttcgatgaagtatttaacgctactaaatttgctagcgtatatgcctggaaccggaagagaataagcaactgtgttgcagactatagc

SEQ ID NO: 531 - DNA, 114 bp, synthetic construct
  source 1..114: mol_type = other DNA
ttcccaaatatcactaatctttgccccttcgatgaagtatttaacgctactaaatttgctagcgtatatgcctggaaccggaagagaataagcaactgtgttgcagactatagc

SEQ ID NO: 532 - DNA, 111 bp, synthetic construct
  source 1..111: mol_type = other DNA
ccaaatatcactaatctttgccccttcgatgaagtatttaacgctactaaatttgctagcgtatatgcctggaaccggaagagaataagcaactgtgttgcagactatagc

SEQ ID NO: 533 - DNA, 108 bp, synthetic construct
  source 1..108: mol_type = other DNA
aatatcactaatctttgccccttcgatgaagtatttaacgctactaaatttgctagcgtatatgcctggaaccggaagagaataagcaactgtgttgcagactatagc

SEQ ID NO: 534 - DNA, 105 bp, synthetic construct
  source 1..105: mol_type = other DNA
atcactaatctttgccccttcgatgaagtatttaacgctactaaatttgctagcgtatatgcctggaaccggaagagaataagcaactgtgttgcagactatagc

SEQ ID NO: 535 - DNA, 102 bp, synthetic construct
  source 1..102: mol_type = other DNA
actaatctttgccccttcgatgaagtatttaacgctactaaatttgctagcgtatatgcctggaaccggaagagaataagcaactgtgttgcagactatagc

SEQ ID NO: 536 - DNA, 99 bp, synthetic construct
  source 1..99: mol_type = other DNA
aatctttgccccttcgatgaagtatttaacgctactaaatttgctagcgtatatgcctggaaccggaagagaataagcaactgtgttgcagactatagc

SEQ ID NO: 537 - DNA, 96 bp, synthetic construct
  source 1..96: mol_type = other DNA
ctttgccccttcgatgaagtatttaacgctactaaatttgctagcgtatatgcctggaaccggaagagaataagcaactgtgttgcagactatagc

SEQ ID NO: 538 - DNA, 93 bp, synthetic construct
  source 1..93: mol_type = other DNA
tgccccttcgatgaagtatttaacgctactaaatttgctagcgtatatgcctggaaccggaagagaataagcaactgtgttgcagactatagc

SEQ ID NO: 539 - DNA, 90 bp, synthetic construct
  source 1..90: mol_type = other DNA
cccttcgatgaagtatttaacgctactaaatttgctagcgtatatgcctggaaccggaagagaataagcaactgtgttgcagactatagc

SEQ ID NO: 540 - DNA, 87 bp, synthetic construct
  source 1..87: mol_type = other DNA
ttcgatgaagtatttaacgctactaaatttgctagcgtatatgcctggaaccggaagagaataagcaactgtgttgcagactatagc

SEQ ID NO: 541 - DNA, 84 bp, synthetic construct
  source 1..84: mol_type = other DNA
gatgaagtatttaacgctactaaatttgctagcgtatatgcctggaaccggaagagaataagcaactgtgttgcagactatagc

SEQ ID NO: 542 - DNA, 117 bp, synthetic construct
  source 1..117: mol_type = other DNA
tccactaatcttgtaaaaaacaaatgcgtgaacttcaatttcaatggcctcaccggaacaggtgttttgacagaatctaacaaaaaattccttcccttccagcaattcgggagagat

SEQ ID NO: 543 - DNA, 114 bp, synthetic construct
  source 1..114: mol_type = other DNA
tccactaatcttgtaaaaaacaaatgcgtgaacttcaatttcaatggcctcaccggaacaggtgttttgacagaatctaacaaaaaattccttcccttccagcaattcgggaga

SEQ ID NO: 544 - DNA, 111 bp, synthetic construct
  source 1..111: mol_type = other DNA
tccactaatcttgtaaaaaacaaatgcgtgaacttcaatttcaatggcctcaccggaacaggtgttttgacagaatctaacaaaaaattccttcccttccagcaattcggg

SEQ ID NO: 545 - DNA, 108 bp, synthetic construct
  source 1..108: mol_type = other DNA
tccactaatcttgtaaaaaacaaatgcgtgaacttcaatttcaatggcctcaccggaacaggtgttttgacagaatctaacaaaaaattccttcccttccagcaattc

SEQ ID NO: 546 - DNA, 105 bp, synthetic construct
  source 1..105: mol_type = other DNA
tccactaatcttgtaaaaaacaaatgcgtgaacttcaatttcaatggcctcaccggaacaggtgttttgacagaatctaacaaaaaattccttcccttccagcaa

SEQ ID NO: 547 - DNA, 102 bp, synthetic construct
  source 1..102: mol_type = other DNA
tccactaatcttgtaaaaaacaaatgcgtgaacttcaatttcaatggcctcaccggaacaggtgttttgacagaatctaacaaaaaattccttcccttccag

SEQ ID NO: 548 - DNA, 99 bp, synthetic construct
  source 1..99: mol_type = other DNA
tccactaatcttgtaaaaaacaaatgcgtgaacttcaatttcaatggcctcaccggaacaggtgttttgacagaatctaacaaaaaattccttcccttc

SEQ ID NO: 549 - DNA, 96 bp, synthetic construct
  source 1..96: mol_type = other DNA
tccactaatcttgtaaaaaacaaatgcgtgaacttcaatttcaatggcctcaccggaacaggtgttttgacagaatctaacaaaaaattccttccc

SEQ ID NO: 550 - DNA, 93 bp, synthetic construct
  source 1..93: mol_type = other DNA
tccactaatcttgtaaaaaacaaatgcgtgaacttcaatttcaatggcctcaccggaacaggtgttttgacagaatctaacaaaaaattcctt

SEQ ID NO: 551 - DNA, 90 bp, synthetic construct
  source 1..90: mol_type = other DNA
tccactaatcttgtaaaaaacaaatgcgtgaacttcaatttcaatggcctcaccggaacaggtgttttgacagaatctaacaaaaaattc

SEQ ID NO: 552 - DNA, 87 bp, synthetic construct
  source 1..87: mol_type = other DNA
tccactaatcttgtaaaaaacaaatgcgtgaacttcaatttcaatggcctcaccggaacaggtgttttgacagaatctaacaaaaaa

SEQ ID NO: 553 - DNA, 84 bp, synthetic construct
  source 1..84: mol_type = other DNA
tccactaatcttgtaaaaaacaaatgcgtgaacttcaatttcaatggcctcaccggaacaggtgttttgacagaatctaacaaa

SEQ ID NO: 554 - DNA, 81 bp, synthetic construct
  source 1..81: mol_type = other DNA
tccactaatcttgtaaaaaacaaatgcgtgaacttcaatttcaatggcctcaccggaacaggtgttttgacagaatctaac

SEQ ID NO: 555 - DNA, 78 bp, synthetic construct
  source 1..78: mol_type = other DNA
tccactaatcttgtaaaaaacaaatgcgtgaacttcaatttcaatggcctcaccggaacaggtgttttgacagaatct

SEQ ID NO: 556 - DNA, 75 bp, synthetic construct
  source 1..75: mol_type = other DNA
tccactaatcttgtaaaaaacaaatgcgtgaacttcaatttcaatggcctcaccggaacaggtgttttgacagaa

SEQ ID NO: 557 - DNA, 72 bp, synthetic construct
  source 1..72: mol_type = other DNA
tccactaatcttgtaaaaaacaaatgcgtgaacttcaatttcaatggcctcaccggaacaggtgttttgaca

SEQ ID NO: 558 - DNA, 69 bp, synthetic construct
  source 1..69: mol_type = other DNA
tccactaatcttgtaaaaaacaaatgcgtgaacttcaatttcaatggcctcaccggaacaggtgttttg

SEQ ID NO: 559 - DNA, 66 bp, synthetic construct
  source 1..66: mol_type = other DNA
tccactaatcttgtaaaaaacaaatgcgtgaacttcaatttcaatggcctcaccggaacaggtgtt

SEQ ID NO: 560 - DNA, 63 bp, synthetic construct
  source 1..63: mol_type = other DNA
tccactaatcttgtaaaaaacaaatgcgtgaacttcaatttcaatggcctcaccggaacaggt

SEQ ID NO: 561 - DNA, 60 bp, synthetic construct
  source 1..60: mol_type = other DNA
tccactaatcttgtaaaaaacaaatgcgtgaacttcaatttcaatggcctcaccggaaca

SEQ ID NO: 562 - DNA, 57 bp, synthetic construct
  source 1..57: mol_type = other DNA
tccactaatcttgtaaaaaacaaatgcgtgaacttcaatttcaatggcctcaccgga

SEQ ID NO: 563 - DNA, 54 bp, synthetic construct
  source 1..54: mol_type = other DNA
tccactaatcttgtaaaaaacaaatgcgtgaacttcaatttcaatggcctcacc

SEQ ID NO: 564 - DNA, 51 bp, synthetic construct
  source 1..51: mol_type = other DNA
tccactaatcttgtaaaaaacaaatgcgtgaacttcaatttcaatggcctc

SEQ ID NO: 565 - DNA, 48 bp, synthetic construct
  source 1..48: mol_type = other DNA
tccactaatcttgtaaaaaacaaatgcgtgaacttcaatttcaatggc

SEQ ID NO: 566 - DNA, 45 bp, synthetic construct
  source 1..45: mol_type = other DNA
tccactaatcttgtaaaaaacaaatgcgtgaacttcaatttcaat

SEQ ID NO: 567 - DNA, 42 bp, synthetic construct
  source 1..42: mol_type = other DNA
tccactaatcttgtaaaaaacaaatgcgtgaacttcaatttc

SEQ ID NO: 568 - DNA, 39 bp, synthetic construct
  source 1..39: mol_type = other DNA
tccactaatcttgtaaaaaacaaatgcgtgaacttcaat

SEQ ID NO: 569 - DNA, 36 bp, synthetic construct
  source 1..36: mol_type = other DNA
tccactaatcttgtaaaaaacaaatgcgtgaacttc

SEQ ID NO: 570 - DNA, 33 bp, synthetic construct
  source 1..33: mol_type = other DNA
tccactaatcttgtaaaaaacaaatgcgtgaac

SEQ ID NO: 571 - DNA, 30 bp, synthetic construct
  source 1..30: mol_type = other DNA
tccactaatcttgtaaaaaacaaatgcgtg

SEQ ID NO: 572 - DNA, 27 bp, synthetic construct
  source 1..27: mol_type = other DNA
tccactaatcttgtaaaaaacaaatgc

SEQ ID NO: 573 - DNA, 24 bp, synthetic construct
  source 1..24: mol_type = other DNA
tccactaatcttgtaaaaaacaaa

SEQ ID NO: 574 - DNA, 21 bp, synthetic construct
  source 1..21: mol_type = other DNA
tccactaatcttgtaaaaaac

SEQ ID NO: 575 - DNA, 18 bp, synthetic construct
  source 1..18: mol_type = other DNA
tccactaatcttgtaaaa

SEQ ID NO: 576 - DNA, 15 bp, synthetic construct
  source 1..15: mol_type = other DNA
tccactaatcttgta

SEQ ID NO: 577 - DNA, 12 bp, synthetic construct
  source 1..12: mol_type = other DNA
tccactaatctt

SEQ ID NO: 578-580 - skipped (3 entries)

SEQ ID NO: 581 - DNA, 117 bp, synthetic construct
  source 1..117: mol_type = other DNA
tccactaatcttgtaaaaaacaaatgcgtgaacttcaatttcaatggcctcaaaggaacaggtgttttgacagaatctaacaaaaaattccttcccttccagcaattcgggagagat

SEQ ID NO: 582 - DNA, 114 bp, synthetic construct
  source 1..114: mol_type = other DNA
tccactaatcttgtaaaaaacaaatgcgtgaacttcaatttcaatggcctcaaaggaacaggtgttttgacagaatctaacaaaaaattccttcccttccagcaattcgggaga

SEQ ID NO: 583 - DNA, 111 bp, synthetic construct
  source 1..111: mol_type = other DNA
tccactaatcttgtaaaaaacaaatgcgtgaacttcaatttcaatggcctcaaaggaacaggtgttttgacagaatctaacaaaaaattccttcccttccagcaattcggg

SEQ ID NO: 584 - DNA, 108 bp, synthetic construct
  source 1..108: mol_type = other DNA
tccactaatcttgtaaaaaacaaatgcgtgaacttcaatttcaatggcctcaaaggaacaggtgttttgacagaatctaacaaaaaattccttcccttccagcaattc

SEQ ID NO: 585 - DNA, 105 bp, synthetic construct
  source 1..105: mol_type = other DNA
tccactaatcttgtaaaaaacaaatgcgtgaacttcaatttcaatggcctcaaaggaacaggtgttttgacagaatctaacaaaaaattccttcccttccagcaa

SEQ ID NO: 586 - DNA, 102 bp, synthetic construct
  source 1..102: mol_type = other DNA
tccactaatcttgtaaaaaacaaatgcgtgaacttcaatttcaatggcctcaaaggaacaggtgttttgacagaatctaacaaaaaattccttcccttccag

SEQ ID NO: 587 - DNA, 99 bp, synthetic construct
  source 1..99: mol_type = other DNA
tccactaatcttgtaaaaaacaaatgcgtgaacttcaatttcaatggcctcaaaggaacaggtgttttgacagaatctaacaaaaaattccttcccttc

SEQ ID NO: 588 - DNA, 96 bp, synthetic construct
  source 1..96: mol_type = other DNA
tccactaatcttgtaaaaaacaaatgcgtgaacttcaatttcaatggcctcaaaggaacaggtgttttgacagaatctaacaaaaaattccttccc

SEQ ID NO: 589 - DNA, 93 bp, synthetic construct
  source 1..93: mol_type = other DNA
tccactaatcttgtaaaaaacaaatgcgtgaacttcaatttcaatggcctcaaaggaacaggtgttttgacagaatctaacaaaaaattcctt

SEQ ID NO: 590 - DNA, 90 bp, synthetic construct
  source 1..90: mol_type = other DNA
tccactaatcttgtaaaaaacaaatgcgtgaacttcaatttcaatggcctcaaaggaacaggtgttttgacagaatctaacaaaaaattc

SEQ ID NO: 591 - DNA, 87 bp, synthetic construct
  source 1..87: mol_type = other DNA
tccactaatcttgtaaaaaacaaatgcgtgaacttcaatttcaatggcctcaaaggaacaggtgttttgacagaatctaacaaaaaa

SEQ ID NO: 592 - DNA, 84 bp, synthetic construct
  source 1..84: mol_type = other DNA
tccactaatcttgtaaaaaacaaatgcgtgaacttcaatttcaatggcctcaaaggaacaggtgttttgacagaatctaacaaa

SEQ ID NO: 593 - DNA, 81 bp, synthetic construct
  source 1..81: mol_type = other DNA
tccactaatcttgtaaaaaacaaatgcgtgaacttcaatttcaatggcctcaaaggaacaggtgttttgacagaatctaac

SEQ ID NO: 594 - DNA, 78 bp, synthetic construct
  source 1..78: mol_type = other DNA
tccactaatcttgtaaaaaacaaatgcgtgaacttcaatttcaatggcctcaaaggaacaggtgttttgacagaatct

SEQ ID NO: 595 - DNA, 75 bp, synthetic construct
  source 1..75: mol_type = other DNA
tccactaatcttgtaaaaaacaaatgcgtgaacttcaatttcaatggcctcaaaggaacaggtgttttgacagaa

SEQ ID NO: 596 - DNA, 72 bp, synthetic construct
  source 1..72: mol_type = other DNA
tccactaatcttgtaaaaaacaaatgcgtgaacttcaatttcaatggcctcaaaggaacaggtgttttgaca

SEQ ID NO: 597 - DNA, 69 bp, synthetic construct
  source 1..69: mol_type = other DNA
tccactaatcttgtaaaaaacaaatgcgtgaacttcaatttcaatggcctcaaaggaacaggtgttttg

SEQ ID NO: 598 - DNA, 66 bp, synthetic construct
  source 1..66: mol_type = other DNA
tccactaatcttgtaaaaaacaaatgcgtgaacttcaatttcaatggcctcaaaggaacaggtgtt

SEQ ID NO: 599 - DNA, 63 bp, synthetic construct
  source 1..63: mol_type = other DNA
tccactaatcttgtaaaaaacaaatgcgtgaacttcaatttcaatggcctcaaaggaacaggt

SEQ ID NO: 600 - DNA, 60 bp, synthetic construct
  source 1..60: mol_type = other DNA
tccactaatcttgtaaaaaacaaatgcgtgaacttcaatttcaatggcctcaaaggaaca

SEQ ID NO: 601 - DNA, 57 bp, synthetic construct
  source 1..57: mol_type = other DNA
tccactaatcttgtaaaaaacaaatgcgtgaacttcaatttcaatggcctcaaagga

SEQ ID NO: 602 - DNA, 54 bp, synthetic construct
  source 1..54: mol_type = other DNA
tccactaatcttgtaaaaaacaaatgcgtgaacttcaatttcaatggcctcaaa

SEQ ID NO: 603 - protein, 163 aa, synthetic construct
VLYNSASFSTFKCYGVSPTKLNDLCFTNVYADSFVIRGDEVRQIAPGQTGKIADYNYKLPDDFTGCVIAWNSNNLDSKVGGNYNYLYRLFRKSNLKPFERDISTEIYQAGSTPCNGVEGFNCYFPLQSYGFQPTNGVGYQPYRVVVLSFELLHAPATVCGPKK

SEQ ID NO: 604 - protein, 163 aa, synthetic construct
VLYNLAPFFTFKCYGVSPTKLNDLCFTNVYADSFVIRGDEVRQIAPGQTGNIADYNYKLPDDFTGCVIAWNSKNLDSKVSGNYNYLYRLFRKSNLKPFERDISTEIYQAGNKPCNGVAGFNCYFPLRSYSFRPTYGVGHQPYRVVVLSFELLHAPATVCGPKK

SEQ ID NO: 605 - protein, 163 aa, synthetic construct
VLYNSASFSTFKCYGVSPTKLNDLCFTNVYADSFVIRGDEVRQIAPGQTGKIADYNYKLPDDFTGCVIAWNSNNLDSKVGGNYNYLYRLFRKSNLKPFERDISTEIYQAGSTPCNGVKGFNCYFPLQSYGFQPTYGVGYQPYRVVVLSFELLHAPATVCGPKK

SEQ ID NO: 606 - protein, 163 aa, synthetic construct
VLYNLAPFFTFKCYGVSPTKLNDLCFTNVYADSFVIRGDEVRQIAPGQTGNIADYNYKLPDDFTGCVIAWNSKNLDSKVSGNYNYRYRLFRKSNLKPFERDISTEIYQAGNKPCNGVKGFNCYFPLRSYSFRPTYGVGHQPYRVVVLSFELLHAPATVCGPKK

SEQ ID NO: 607 - DNA, 489 bp, synthetic construct
  source 1..489: mol_type = other DNA
gtgctttacaattccgcatcctttagtaccttcaaatgttacggtgtgagccccaccaaactcaatgatctctgtttcacaaacgtgtacgcagatagtttcgttatacgcggggacgaagtacggcagatagcccctggccagacaggaaagatagccgattacaactacaaacttccagacgattttacagggtgtgtgatcgcttggaattcaaataacctggactccaaagtgggaggcaactataattacctgtaccgactgttccgcaaaagcaacttgaaacctttcgagcgagatatatcaaccgaaatctaccaagctggttctacaccttgtaatggtgtggagggatttaactgctacttccctcttcagtcctatggatttcagcctacaaatggagtcgggtatcaaccctatagagtcgtggtgttgtcatttgaacttctccatgcacctgctactgtctgtggtccaaaaaag

SEQ ID NO: 608 - DNA, 489 bp, synthetic construct
  source 1..489: mol_type = other DNA
gtgctttacaatcttgctccattctttaccttcaaatgttacggtgtgagccccaccaaactcaatgatctctgtttcacaaacgtgtacgcagatagtttcgttatacgcggggacgaagtacggcagatagcccctggccagacaggaaacatagccgattacaactacaaacttccagacgattttacagggtgtgtgatcgcttggaattcaaaaaacctggactccaaagtgagtggcaactataattacctgtaccgactgttccgcaaaagcaacttgaaacctttcgagcgagatatatcaaccgaaatctaccaagctggtaataaaccttgtaatggtgtggccggatttaactgctacttccctcttagatcctatagctttaggcctacatacggagtcgggcaccaaccctatagagtcgtggtgttgtcatttgaacttctccatgcacctgctactgtctgtggtccaaaaaag

SEQ ID NO: 609 - DNA, 489 bp, synthetic construct
  source 1..489: mol_type = other DNA
gtgctttacaattccgcatcctttagtaccttcaaatgttacggtgtgagccccaccaaactcaatgatctctgtttcacaaacgtgtacgcagatagtttcgttatacgcggggacgaagtacggcagatagcccctggccagacaggaaagatagccgattacaactacaaacttccagacgattttacagggtgtgtgatcgcttggaattcaaataacctggactccaaagtgggaggcaactataattacctgtaccgactgttccgcaaaagcaacttgaaacctttcgagcgagatatatcaaccgaaatctaccaagctggttctacaccttgtaatggtgtgaagggatttaactgctacttccctcttcagtcctatggatttcagcctacatacggagtcgggtatcaaccctatagagtcgtggtgttgtcatttgaacttctccatgcacctgctactgtctgtggtccaaaaaag

SEQ ID NO: 610 - DNA, 489 bp, synthetic construct
  source 1..489: mol_type = other DNA
gtgctttacaatcttgctccattctttaccttcaaatgttacggtgtgagccccaccaaactcaatgatctctgtttcacaaacgtgtacgcagatagtttcgttatacgcggggacgaagtacggcagatagcccctggccagacaggaaacatagccgattacaactacaaacttccagacgattttacagggtgtgtgatcgcttggaattcaaaaaacctggactccaaagtgagtggcaactataattacagataccgactgttccgcaaaagcaacttgaaacctttcgagcgagatatatcaaccgaaatctaccaagctggtaataaaccttgtaatggtgtgaagggatttaactgctacttccctcttagatcctatagctttaggcctacatacggagtcgggcaccaaccctatagagtcgtggtgttgtcatttgaacttctccatgcacctgctactgtctgtggtccaaaaaag

SEQ ID NO: 611 - protein, 5 aa, synthetic construct
RVQPT

SEQ ID NO: 612 - protein, 5 aa, synthetic construct
VQPTE

SEQ ID NO: 613 - protein, 5 aa, synthetic construct
QPTES

SEQ ID NO: 614 - protein, 5 aa, synthetic construct
PTESI

SEQ ID NO: 615 - protein, 5 aa, synthetic construct
TESIV

SEQ ID NO: 616 - protein, 5 aa, synthetic construct
ESIVR

SEQ ID NO: 617 - protein, 5 aa, synthetic construct
SIVRF

SEQ ID NO: 618 - protein, 5 aa, synthetic construct
IVRFP

SEQ ID NO: 619 - protein, 5 aa, synthetic construct
VRFPN

SEQ ID NO: 620 - protein, 5 aa, synthetic construct
RFPNI

SEQ ID NO: 621 - protein, 5 aa, synthetic construct
FPNIT

SEQ ID NO: 622 - protein, 5 aa, synthetic construct
PNITN

SEQ ID NO: 623 - protein, 5 aa, synthetic construct
NITNL

SEQ ID NO: 624 - protein, 5 aa, synthetic construct
ITNLC

SEQ ID NO: 625 - protein, 5 aa, synthetic construct
TNLCP

SEQ ID NO: 626 - protein, 5 aa, synthetic construct
NLCPF

SEQ ID NO: 627 - protein, 5 aa, synthetic construct
LCPFG

SEQ ID NO: 628 - protein, 5 aa, synthetic construct
CPFGE

SEQ ID NO: 629 - protein, 5 aa, synthetic construct
PFGEV

SEQ ID NO: 630 - protein, 5 aa, synthetic construct
FGEVF

SEQ ID NO: 631 - protein, 5 aa, synthetic construct
GEVFN

SEQ ID NO: 632 - protein, 5 aa, synthetic construct
EVFNA

SEQ ID NO: 633 - protein, 5 aa, synthetic construct
VFNAT

SEQ ID NO: 634 - protein, 5 aa, synthetic construct
FNATR

SEQ ID NO: 635 - protein, 5 aa, synthetic construct
NATRF

SEQ ID NO: 636 - protein, 5 aa, synthetic construct
ATRFA

SEQ ID NO: 637 - protein, 5 aa, synthetic construct
TRFAS

SEQ ID NO: 638 - protein, 5 aa, synthetic construct
RFASV

SEQ ID NO: 639 - protein, 5 aa, synthetic construct
FASVY

SEQ ID NO: 640 - protein, 5 aa, synthetic construct
ASVYA

SEQ ID NO: 641 - protein, 5 aa, synthetic construct
SVYAW

SEQ ID NO: 642 - protein, 5 aa, synthetic construct
VYAWN

SEQ ID NO: 643 - protein, 5 aa, synthetic construct
YAWNR

SEQ ID NO: 644 - protein, 5 aa, synthetic construct
AWNRK

SEQ ID NO: 645 - protein, 5 aa, synthetic construct
WNRKR

SEQ ID NO: 646 - protein, 5 aa, synthetic construct
NRKRI

SEQ ID NO: 647 - protein, 5 aa, synthetic construct
RKRIS

SEQ ID NO: 648 - protein, 5 aa, synthetic construct
KRISN

SEQ ID NO: 649 - protein, 5 aa, synthetic construct
RISNC

SEQ ID NO: 650 - protein, 5 aa, synthetic construct
ISNCV

SEQ ID NO: 651 - protein, 5 aa, synthetic construct
SNCVA

SEQ ID NO: 652 - protein, 5 aa, synthetic construct
NCVAD

SEQ ID NO: 653 - protein, 5 aa, synthetic construct
CVADY

SEQ ID NO: 654 - protein, 5 aa, synthetic construct
VADYS

SEQ ID NO: 655 - protein, 5 aa, synthetic construct
ADYSV

SEQ ID NO: 656 - protein, 5 aa, synthetic construct
DYSVL

SEQ ID NO: 657 - protein, 5 aa, synthetic construct
YSVLY

SEQ ID NO: 658 - protein, 5 aa, synthetic construct
SVLYN

SEQ ID NO: 659 - protein, 5 aa, synthetic construct
LCPFD

SEQ ID NO: 660 - protein, 5 aa, synthetic construct
CPFDE

SEQ ID NO: 661 - protein, 5 aa, synthetic construct
PFDEV

SEQ ID NO: 662 - protein, 5 aa, synthetic construct
FDEVF

SEQ ID NO: 663 - protein, 5 aa, synthetic construct
DEVFN

SEQ ID NO: 664 - protein, 5 aa, synthetic construct
FNATK

SEQ ID NO: 665 - protein, 5 aa, synthetic construct
NATKF

SEQ ID NO: 666 - protein, 5 aa, synthetic construct
ATKFA

SEQ ID NO: 667 - protein, 5 aa, synthetic construct
TKFAS

SEQ ID NO: 668 - protein, 5 aa, synthetic construct
KFASV

SEQ ID NO: 669 - protein, 5 aa, synthetic construct
QFGRD

SEQ ID NO: 670 - protein, 5 aa, synthetic construct
QQFGR

SEQ ID NO: 671 - protein, 5 aa, synthetic construct
FQQFG

SEQ ID NO: 672 - protein, 5 aa, synthetic construct
PFQQF

SEQ ID NO: 673 - protein, 5 aa, synthetic construct
LPFQQ

SEQ ID NO: 674 - protein, 5 aa, synthetic construct
FLPFQ

SEQ ID NO: 675 - protein, 5 aa, synthetic construct
KFLPF

SEQ ID NO: 676 - protein, 5 aa, synthetic construct
KKFLP

SEQ ID NO: 677 - protein, 5 aa, synthetic construct
NKKFL

SEQ ID NO: 678 - protein, 5 aa, synthetic construct
SNKKF

SEQ ID NO: 679 - protein, 5 aa, synthetic construct
ESNKK

SEQ ID NO: 680 - protein, 5 aa, synthetic construct
TESNK

SEQ ID NO: 681 - protein, 5 aa, synthetic construct
LTESN

SEQ ID NO: 682 - protein, 5 aa, synthetic construct
VLTES

SEQ ID NO: 683 - protein, 5 aa, synthetic construct
GVLTE

SEQ ID NO: 684 - protein, 5 aa, synthetic construct
TGVLT

SEQ ID NO: 685 - protein, 5 aa, synthetic construct
GTGVL

SEQ ID NO: 686 - protein, 5 aa, synthetic construct
TGTGV

SEQ ID NO: 687 - protein, 5 aa, synthetic construct
LTGTG

SEQ ID NO: 688 - protein, 5 aa, synthetic construct
GLTGT

SEQ ID NO: 689 - protein, 5 aa, synthetic construct
NGLTG

SEQ ID NO: 690 - protein, 5 aa, synthetic construct
FNGLT

SEQ ID NO: 691 - protein, 5 aa, synthetic construct
NFNGL

SEQ ID NO: 692 - protein, 5 aa, synthetic construct
FNFNG

SEQ ID NO: 693 - protein, 5 aa, synthetic construct
NFNFN

SEQ ID NO: 694 - protein, 5 aa, synthetic construct
VNFNF

SEQ ID NO: 695 - protein, 5 aa, synthetic construct
CVNFN

SEQ ID NO: 696 - protein, 5 aa, synthetic construct
KCVNF

SEQ ID NO: 697 - protein, 5 aa, synthetic construct
NKCVN

SEQ ID NO: 698 - protein, 5 aa, synthetic construct
KNKCV

SEQ ID NO: 699 - protein, 5 aa, synthetic construct
VKNKC

SEQ ID NO: 700 - protein, 5 aa, synthetic construct
LVKNK

SEQ ID NO: 701 - protein, 5 aa, synthetic construct
NLVKN

SEQ ID NO: 702 - protein, 5 aa, synthetic construct
TNLVK

SEQ ID NO: 703 - protein, 5 aa, synthetic construct
STNLV

SEQ ID NO: 704 - protein, 5 aa, synthetic construct
KSTNL

SEQ ID NO: 705 - protein, 5 aa, synthetic construct
KKSTN

SEQ ID NO: 706 - protein, 5 aa, synthetic construct
PKKST

SEQ ID NO: 707 - protein, 5 aa, synthetic construct
GPKKS

SEQ ID NO: 708 - protein, 5 aa, synthetic construct
KGTGV

SEQ ID NO: 709 - protein, 5 aa, synthetic construct
LKGTG

SEQ ID NO: 710 - protein, 5 aa, synthetic construct
GLKGT

SEQ ID NO: 711 - protein, 5 aa, synthetic construct
NGLKG

SEQ ID NO: 712 - protein, 5 aa, synthetic construct
FNGLK

SEQ ID NO: 713 - DNA, 15 bp, synthetic construct
  source 1..15: mol_type = other DNA
agggttcagcccacc

SEQ ID NO: 714 - DNA, 15 bp, synthetic construct
  source 1..15: mol_type = other DNA
gttcagcccaccgaa

SEQ ID NO: 715 - DNA, 15 bp, synthetic construct
  source 1..15: mol_type = other DNA
cagcccaccgaatca

SEQ ID NO: 716 - DNA, 15 bp, synthetic construct
  source 1..15: mol_type = other DNA
cccaccgaatcaata

SEQ ID NO: 717 - DNA, 15 bp, synthetic construct
  source 1..15: mol_type = other DNA
accgaatcaatagta

SEQ ID NO: 718 - DNA, 15 bp, synthetic construct
  source 1..15: mol_type = other DNA
gaatcaatagtacgg

SEQ ID NO: 719 - DNA, 15 bp, synthetic construct
  source 1..15: mol_type = other DNA
tcaatagtacggttc

SEQ ID NO: 720 - DNA, 15 bp, synthetic construct
  source 1..15: mol_type = other DNA
atagtacggttccca

SEQ ID NO: 721 - DNA, 15 bp, synthetic construct
  source 1..15: mol_type = other DNA
gtacggttcccaaat

SEQ ID NO: 722 - DNA, 15 bp, synthetic construct
  source 1..15: mol_type = other DNA
cggttcccaaatatc

SEQ ID NO: 723 - DNA, 15 bp, synthetic construct
  source 1..15: mol_type = other DNA
ttcccaaatatcact

SEQ ID NO: 724 - DNA, 15 bp, synthetic construct
  source 1..15: mol_type = other DNA
ccaaatatcactaat

SEQ ID NO: 725 - DNA, 15 bp, synthetic construct
  source 1..15: mol_type = other DNA
aatatcactaatctt

SEQ ID NO: 726 - DNA, 15 bp, synthetic construct
  source 1..15: mol_type = other DNA
atcactaatctttgc

SEQ ID NO: 727 - DNA, 15 bp, synthetic construct
  source 1..15: mol_type = other DNA
actaatctttgcccc

SEQ ID NO: 728 - DNA, 15 bp, synthetic construct
  source 1..15: mol_type = other DNA
aatctttgccccttc

SEQ ID NO: 729 - DNA, 15 bp, synthetic construct
  source 1..15: mol_type = other DNA
ctttgccccttcggg

SEQ ID NO: 730 - DNA, 15 bp, synthetic construct
  source 1..15: mol_type = other DNA
tgccccttcggggaa

SEQ ID NO: 731 - DNA, 15 bp, synthetic construct
  source 1..15: mol_type = other DNA
cccttcggggaagta

SEQ ID NO: 732 - DNA, 15 bp, synthetic construct
  source 1..15: mol_type = other DNA
ttcggggaagtattt

SEQ ID NO: 733 - DNA, 15 bp, synthetic construct
  source 1..15: mol_type = other DNA
ggggaagtatttaac

SEQ ID NO: 734 - DNA, 15 bp, synthetic construct
  source 1..15: mol_type = other DNA
gaagtatttaacgct

SEQ ID NO: 735 - DNA, 15 bp, synthetic construct
  source 1..15: mol_type = other DNA
gtatttaacgctact

SEQ ID NO: 736 - DNA, 15 bp, synthetic construct
  source 1..15: mol_type = other DNA
tttaacgctactcga

SEQ ID NO: 737 - DNA, 15 bp, synthetic construct
  source 1..15: mol_type = other DNA
aacgctactcgattt

SEQ ID NO: 738 - DNA, 15 bp, synthetic construct
  source 1..15: mol_type = other DNA
gctactcgatttgct

SEQ ID NO: 739 - DNA, 15 bp, synthetic construct
  source 1..15: mol_type = other DNA
actcgatttgctagc

SEQ ID NO: 740 - DNA, 15 bp, synthetic construct
  source 1..15: mol_type = other DNA
cgatttgctagcgta

SEQ ID NO: 741 - DNA, 15 bp, synthetic construct
  source 1..15: mol_type = other DNA
tttgctagcgtatat

SEQ ID NO: 742 - DNA, 15 bp, synthetic construct
  source 1..15: mol_type = other DNA
gctagcgtatatgcc

SEQ ID NO: 743 - DNA, 15 bp, synthetic construct
  source 1..15: mol_type = other DNA
agcgtatatgcctgg

SEQ ID NO: 744 - DNA, 15 bp, synthetic construct
  source 1..15: mol_type = other DNA
gtatatgcctggaac

SEQ ID NO: 745 - DNA, 15 bp, synthetic construct
  source 1..15: mol_type = other DNA
tatgcctggaaccgg

SEQ ID NO: 746 - DNA, 15 bp, synthetic construct
  source 1..15: mol_type = other DNA
gcctggaaccggaag

SEQ ID NO: 747 - DNA, 15 bp, synthetic construct
  source 1..15: mol_type = other DNA
tggaaccggaagaga

SEQ ID NO: 748 - DNA, 15 bp, synthetic construct
  source 1..15: mol_type = other DNA
aaccggaagagaata

SEQ ID NO: 749 - DNA, 15 bp, synthetic construct
  source 1..15: mol_type = other DNA
cggaagagaataagc

SEQ ID NO: 750 - DNA, 15 bp, synthetic construct
  source 1..15: mol_type = other DNA
aagagaataagcaac

SEQ ID NO: 751 - DNA, 15 bp, synthetic construct
  source 1..15: mol_type = other DNA
agaataagcaactgt

SEQ ID NO: 752 - DNA, 15 bp, synthetic construct
  source 1..15: mol_type = other DNA
ataagcaactgtgtt

SEQ ID NO: 753 - DNA, 15 bp, synthetic construct
  source 1..15: mol_type = other DNA
agcaactgtgttgca

SEQ ID NO: 754 - DNA, 15 bp, synthetic construct
  source 1..15: mol_type = other DNA
aactgtgttgcagac

SEQ ID NO: 755 - DNA, 15 bp, synthetic construct
  source 1..15: mol_type = other DNA
tgtgttgcagactat

SEQ ID NO: 756 - DNA, 15 bp, synthetic construct
  source 1..15: mol_type = other DNA
gttgcagactatagc

SEQ ID NO: 757 - DNA, 15 bp, synthetic construct
  source 1..15: mol_type = other DNA
gcagactatagcgtg

SEQ ID NO: 758 - DNA, 15 bp, synthetic construct
  source 1..15: mol_type = other DNA
gactatagcgtgctt

SEQ ID NO: 759 - DNA, 15 bp, synthetic construct
  source 1..15: mol_type = other DNA
tatagcgtgctttac

SEQ ID NO: 760 - DNA, 15 bp, synthetic construct
  source 1..15: mol_type = other DNA
agcgtgctttacaat

SEQ ID NO: 761 - DNA, 15 bp, synthetic construct
  source 1..15: mol_type = other DNA
ctttgccccttcgat

SEQ ID NO: 762 - DNA, 15 bp, synthetic construct
  source 1..15: mol_type = other DNA
tgccccttcgatgaa

SEQ ID NO: 763 - DNA, 15 bp, synthetic construct
  source 1..15: mol_type = other DNA
cccttcgatgaagta

SEQ ID NO: 764 - DNA, 15 bp, synthetic construct
  source 1..15: mol_type = other DNA
ttcgatgaagtattt

SEQ ID NO: 765 - DNA, 15 bp, synthetic construct
  source 1..15: mol_type = other DNA
gatgaagtatttaac

SEQ ID NO: 766 - DNA, 15 bp, synthetic construct
  source 1..15: mol_type = other DNA
tttaacgctactaaa

SEQ ID NO: 767 - DNA, 15 bp, synthetic construct
  source 1..15: mol_type = other DNA
aacgctactaaattt

SEQ ID NO: 768 - DNA, 15 bp, synthetic construct
  source 1..15: mol_type = other DNA
gctactaaatttgct

SEQ ID NO: 769 - DNA, 15 bp, synthetic construct
  source 1..15: mol_type = other DNA
actaaatttgctagc

SEQ ID NO: 770 - DNA, 15 bp, synthetic construct
  source 1..15: mol_type = other DNA
aaatttgctagcgta

SEQ ID NO: 771 - DNA, 15 bp, synthetic construct
  source 1..15: mol_type = other DNA
caattcgggagagat

SEQ ID NO: 772 - DNA, 15 bp, synthetic construct
  source 1..15: mol_type = other DNA
cagcaattcgggaga

SEQ ID NO: 773 - DNA, 15 bp, synthetic construct
  source 1..15: mol_type = other DNA
ttccagcaattcggg

SEQ ID NO: 774 - DNA, 15 bp, synthetic construct
  source 1..15: mol_type = other DNA
cccttccagcaattc

SEQ ID NO: 775 - DNA, 15 bp, synthetic construct
  source 1..15: mol_type = other DNA
cttcccttccagcaa

SEQ ID NO: 776 - DNA, 15 bp, synthetic construct
  source 1..15: mol_type = other DNA
ttccttcccttccag

SEQ ID NO: 777 - DNA, 15 bp, synthetic construct
  source 1..15: mol_type = other DNA
aaattccttcccttc

SEQ ID NO: 778 - DNA, 15 bp, synthetic construct
  source 1..15: mol_type = other DNA
aaaaaattccttccc

SEQ ID NO: 779 - DNA, 15 bp, synthetic construct
  source 1..15: mol_type = other DNA
aacaaaaaattcctt

SEQ ID NO: 780 - DNA, 15 bp, synthetic construct
  source 1..15: mol_type = other DNA
tctaacaaaaaattc

SEQ ID NO: 781 - DNA, 15 bp, synthetic construct
  source 1..15: mol_type = other DNA
gaatctaacaaaaaa

SEQ ID NO: 782 - DNA, 15 bp, synthetic construct
  source 1..15: mol_type = other DNA
acagaatctaacaaa

SEQ ID NO: 783 - DNA, 15 bp, synthetic construct
  source 1..15: mol_type = other DNA
ttgacagaatctaac

SEQ ID NO: 784 - DNA, 15 bp, synthetic construct
  source 1..15: mol_type = other DNA
gttttgacagaatct

SEQ ID NO: 785 - DNA, 15 bp, synthetic construct
  source 1..15: mol_type = other DNA
ggtgttttgacagaa

SEQ ID NO: 786 - DNA, 15 bp, synthetic construct
  source 1..15: mol_type = other DNA
acaggtgttttgaca

SEQ ID NO: 787 - DNA, 15 bp, synthetic construct
  source 1..15: mol_type = other DNA
ggaacaggtgttttg

SEQ ID NO: 788 - DNA, 15 bp, synthetic construct
  source 1..15: mol_type = other DNA
accggaacaggtgtt

SEQ ID NO: 789 - DNA, 15 bp, synthetic construct
  source 1..15: mol_type = other DNA
ctcaccggaacaggt

SEQ ID NO: 790 - DNA, 15 bp, synthetic construct
  source 1..15: mol_type = other DNA
ggcctcaccggaaca

SEQ ID NO: 791 - DNA, 15 bp, synthetic construct
  source 1..15: mol_type = other DNA
aatggcctcaccgga

SEQ ID NO: 792 - DNA, 15 bp, synthetic construct
  source 1..15: mol_type = other DNA
ttcaatggcctcacc

SEQ ID NO: 793 - DNA, 15 bp, synthetic construct
  source 1..15: mol_type = other DNA
aatttcaatggcctc

SEQ ID NO: 794 - DNA, 15 bp, synthetic construct
  source 1..15: mol_type = other DNA
ttcaatttcaatggc

SEQ ID NO: 795 - DNA, 15 bp, synthetic construct
  source 1..15: mol_type = other DNA
aacttcaatttcaat

SEQ ID NO: 796 - DNA, 15 bp, synthetic construct
  source 1..15: mol_type = other DNA
gtgaacttcaatttc

SEQ ID NO: 797 - DNA, 15 bp, synthetic construct
  source 1..15: mol_type = other DNA
tgcgtgaacttcaat

SEQ ID NO: 798 - DNA, 15 bp, synthetic construct
  source 1..15: mol_type = other DNA
aaatgcgtgaacttc

SEQ ID NO: 799 - DNA, 15 bp, synthetic construct
  source 1..15: mol_type = other DNA
aacaaatgcgtgaac

SEQ ID NO: 800 - DNA, 15 bp, synthetic construct
  source 1..15: mol_type = other DNA
aaaaacaaatgcgtg

SEQ ID NO: 801 - DNA, 15 bp, synthetic construct
  source 1..15: mol_type = other DNA
gtaaaaaacaaatgc

SEQ ID NO: 802 - DNA, 15 bp, synthetic construct
  source 1..15: mol_type = other DNA
cttgtaaaaaacaaa

SEQ ID NO: 803 - DNA, 15 bp, synthetic construct
  source 1..15: mol_type = other DNA
aatcttgtaaaaaac

SEQ ID NO: 804 - DNA, 15 bp, synthetic construct
  source 1..15: mol_type = other DNA
actaatcttgtaaaa

SEQ ID NO: 805 - DNA, 15 bp, synthetic construct
  source 1..15: mol_type = other DNA
tccactaatcttgta

SEQ ID NO: 806 - DNA, 15 bp, synthetic construct
  source 1..15: mol_type = other DNA
aagtccactaatctt

SEQ ID NO: 807 - DNA, 15 bp, synthetic construct
  source 1..15: mol_type = other DNA
aaaaagtccactaat

SEQ ID NO: 808 - DNA, 15 bp, synthetic construct
  source 1..15: mol_type = other DNA
ccaaaaaagtccact

SEQ ID NO: 809 - DNA, 15 bp, synthetic construct
  source 1..15: mol_type = other DNA
ggtccaaaaaagtcc

SEQ ID NO: 810 - DNA, 15 bp, synthetic construct
  source 1..15: mol_type = other DNA
aaaggaacaggtgtt

SEQ ID NO: 811 - DNA, 15 bp, synthetic construct
  source 1..15: mol_type = other DNA
ctcaaaggaacaggt

SEQ ID NO: 812 - DNA, 15 bp, synthetic construct
  source 1..15: mol_type = other DNA
ggcctcaaaggaaca

SEQ ID NO: 813 - DNA, 15 bp, synthetic construct
  source 1..15: mol_type = other DNA
aatggcctcaaagga

SEQ ID NO: 814 - DNA, 15 bp, synthetic construct
  source 1..15: mol_type = other DNA
ttcaatggcctcaaa

SEQ ID NO: 815 - protein, 43 aa, synthetic construct; identical to SEQ ID NO: 250

SEQ ID NO: 816 - protein, 42 aa, synthetic construct; identical to SEQ ID NO: 251

SEQ ID NO: 817 - protein, 41 aa, synthetic construct; identical to SEQ ID NO: 252

SEQ ID NO: 818 - protein, 40 aa, synthetic construct; identical to SEQ ID NO: 253

SEQ ID NO: 819 - protein, 39 aa, synthetic construct; identical to SEQ ID NO: 254

SEQ ID NO: 820 - protein, 38 aa, synthetic construct; identical to SEQ ID NO: 255

SEQ ID NO: 821 - protein, 37 aa, synthetic construct; identical to SEQ ID NO: 256

SEQ ID NO: 822 - protein, 36 aa, synthetic construct; identical to SEQ ID NO: 257

SEQ ID NO: 823 - protein, 35 aa, synthetic construct; identical to SEQ ID NO: 258

SEQ ID NO: 824 - protein, 34 aa, synthetic construct; identical to SEQ ID NO: 259

SEQ ID NO: 825 - protein, 33 aa, synthetic construct; identical to SEQ ID NO: 260

SEQ ID NO: 826 - protein, 32 aa, synthetic construct; identical to SEQ ID NO: 261

SEQ ID NO: 827 - protein, 31 aa, synthetic construct; identical to SEQ ID NO: 262

SEQ ID NO: 828 - protein, 30 aa, synthetic construct; identical to SEQ ID NO: 263

SEQ ID NO: 829 - protein, 29 aa, synthetic construct
FGEVFNATRFASVYAWNRKRISNCVADYS

SEQ ID NO: 830 - protein, 28 aa, synthetic construct
GEVFNATRFASVYAWNRKRISNCVADYS

SEQ ID NO: 831 - protein, 27 aa, synthetic construct
EVFNATRFASVYAWNRKRISNCVADYS

SEQ ID NO: 832 - protein, 26 aa, synthetic construct
VFNATRFASVYAWNRKRISNCVADYS

SEQ ID NO: 833 - protein, 25 aa, synthetic construct
FNATRFASVYAWNRKRISNCVADYS

SEQ ID NO: 834 - protein, 24 aa, synthetic construct
NATRFASVYAWNRKRISNCVADYS

SEQ ID NO: 835 - protein, 23 aa, synthetic construct
ATRFASVYAWNRKRISNCVADYS

SEQ ID NO: 836 - protein, 22 aa, synthetic construct
TRFASVYAWNRKRISNCVADYS

SEQ ID NO: 837 - protein, 21 aa, synthetic construct
RFASVYAWNRKRISNCVADYS

SEQ ID NO: 838 - protein, 20 aa, synthetic construct
FASVYAWNRKRISNCVADYS

SEQ ID NO: 839 - protein, 19 aa, synthetic construct
ASVYAWNRKRISNCVADYS

SEQ ID NO: 840 - protein, 18 aa, synthetic construct
SVYAWNRKRISNCVADYS

SEQ ID NO: 841 - protein, 17 aa, synthetic construct
VYAWNRKRISNCVADYS

SEQ ID NO: 842 - protein, 16 aa, synthetic construct
YAWNRKRISNCVADYS

SEQ ID NO: 843 - protein, 15 aa, synthetic construct
AWNRKRISNCVADYS

SEQ ID NO: 844 - protein, 14 aa, synthetic construct
WNRKRISNCVADYS

SEQ ID NO: 845 - protein, 13 aa, synthetic construct
NRKRISNCVADYS

SEQ ID NO: 846 - protein, 12 aa, synthetic construct
RKRISNCVADYS

SEQ ID NO: 847 - protein, 11 aa, synthetic construct
KRISNCVADYS

SEQ ID NO: 848 - protein, 10 aa, synthetic construct
RISNCVADYS

SEQ ID NO: 849 - protein, 9 aa, synthetic construct
ISNCVADYS

SEQ ID NO: 850 - protein, 8 aa, synthetic construct
SNCVADYS

SEQ ID NO: 851 - protein, 7 aa, synthetic construct
NCVADYS

SEQ ID NO: 852 - protein, 6 aa, synthetic construct
CVADYS

SEQ ID NO: 853 - protein, 5 aa, synthetic construct
VADYS

SEQ ID NO: 854 - protein, 4 aa, synthetic construct
ADYS

SEQ ID NO: 855-857 - skipped (3 entries)

SEQ ID NO: 858 - DNA, 129 bp, synthetic construct; identical to SEQ ID NO: 429
  source 1..129: mol_type = other DNA

SEQ ID NO: 859 - DNA, 126 bp, synthetic construct; identical to SEQ ID NO: 430
  source 1..126: mol_type = other DNA

SEQ ID NO: 860 - DNA, 123 bp, synthetic construct; identical to SEQ ID NO: 431
  source 1..123: mol_type = other DNA

SEQ ID NO: 861 - DNA, 120 bp, synthetic construct; identical to SEQ ID NO: 432
  source 1..120: mol_type = other DNA

SEQ ID NO: 862 - DNA, 117 bp, synthetic construct; identical to SEQ ID NO: 433
  source 1..117: mol_type = other DNA

SEQ ID NO: 863 - DNA, 114 bp, synthetic construct; identical to SEQ ID NO: 434
  source 1..114: mol_type = other DNA

SEQ ID NO: 864 - DNA, 111 bp, synthetic construct; identical to SEQ ID NO: 435
  source 1..111: mol_type = other DNA

SEQ ID NO: 865 - DNA, 108 bp, synthetic construct; identical to SEQ ID NO: 436
  source 1..108: mol_type = other DNA

SEQ ID NO: 866 - DNA, 105 bp, synthetic construct; identical to SEQ ID NO: 437
  source 1..105: mol_type = other DNA

SEQ ID NO: 867 - DNA, 102 bp, synthetic construct; identical to SEQ ID NO: 438
  source 1..102: mol_type = other DNA

SEQ ID NO: 868 - DNA, 99 bp, synthetic construct; identical to SEQ ID NO: 439
  source 1..99: mol_type = other DNA

SEQ ID NO: 869 - DNA, 96 bp, synthetic construct; identical to SEQ ID NO: 440
  source 1..96: mol_type = other DNA

SEQ ID NO: 870 - DNA, 93 bp, synthetic construct; identical to SEQ ID NO: 441
  source 1..93: mol_type = other DNA

SEQ ID NO: 871 - DNA, 90 bp, synthetic construct; identical to SEQ ID NO: 442
  source 1..90: mol_type = other DNA

SEQ ID NO: 872 - DNA, 87 bp, synthetic construct; identical to SEQ ID NO: 443
  source 1..87: mol_type = other DNA

SEQ ID NO: 873 - DNA, 84 bp, synthetic construct; identical to SEQ ID NO: 444
  source 1..84: mol_type = other DNA

SEQ ID NO: 874 - DNA, 81 bp, synthetic construct; identical to SEQ ID NO: 445
  source 1..81: mol_type = other DNA

SEQ ID NO: 875 - DNA, 78 bp, synthetic construct; identical to SEQ ID NO: 446
  source 1..78: mol_type = other DNA

SEQ ID NO: 876 - DNA, 75 bp, synthetic construct; identical to SEQ ID NO: 447
  source 1..75: mol_type = other DNA

SEQ ID NO: 877 - DNA, 72 bp, synthetic construct; identical to SEQ ID NO: 448
  source 1..72: mol_type = other DNA

SEQ ID NO: 878 - DNA, 69 bp, synthetic construct; identical to SEQ ID NO: 449
  source 1..69: mol_type = other DNA

SEQ ID NO: 879 - DNA, 66 bp, synthetic construct; identical to SEQ ID NO: 450
  source 1..66: mol_type = other DNA

SEQ ID NO: 880 - DNA, 63 bp, synthetic construct; identical to SEQ ID NO: 451
  source 1..63: mol_type = other DNA

SEQ ID NO: 881 - DNA, 60 bp, synthetic construct; identical to SEQ ID NO: 452
  source 1..60: mol_type = other DNA

SEQ ID NO: 882 - DNA, 57 bp, synthetic construct; identical to SEQ ID NO: 453
  source 1..57: mol_type = other DNA

SEQ ID NO: 883 - DNA, 54 bp, synthetic construct; identical to SEQ ID NO: 454
  source 1..54: mol_type = other DNA

SEQ ID NO: 884 - DNA, 51 bp, synthetic construct; identical to SEQ ID NO: 455
  source 1..51: mol_type = other DNA

SEQ ID NO: 885 - DNA, 48 bp, synthetic construct; identical to SEQ ID NO: 456
  source 1..48: mol_type = other DNA

SEQ ID NO: 886 - DNA, 45 bp, synthetic construct; identical to SEQ ID NO: 457
  source 1..45: mol_type = other DNA

SEQ ID NO: 887 - DNA, 42 bp, synthetic construct; identical to SEQ ID NO: 458
  source 1..42: mol_type = other DNA

SEQ ID NO: 888 - DNA, 39 bp, synthetic construct; identical to SEQ ID NO: 459
  source 1..39: mol_type = other DNA

SEQ ID NO: 889 - DNA, 36 bp, synthetic construct; identical to SEQ ID NO: 460
  source 1..36: mol_type = other DNA

SEQ ID NO: 890 - DNA, 33 bp, synthetic construct; identical to SEQ ID NO: 461
  source 1..33: mol_type = other DNA

SEQ ID NO: 891 - DNA, 30 bp, synthetic construct; identical to SEQ ID NO: 462
  source 1..30: mol_type = other DNA

SEQ ID NO: 892 - DNA, 27 bp, synthetic construct
  source 1..27: mol_type = other DNA
ataagcaactgtgttgcagactatagc

SEQ ID NO: 893 - DNA, 24 bp, synthetic construct
  source 1..24: mol_type = other DNA
agcaactgtgttgcagactatagc

SEQ ID NO: 894 - DNA, 21 bp, synthetic construct
  source 1..21: mol_type = other DNA
aactgtgttgcagactatagc

SEQ ID NO: 895 - DNA, 18 bp, synthetic construct
  source 1..18: mol_type = other DNA
tgtgttgcagactatagc

SEQ ID NO: 896 - DNA, 15 bp, synthetic construct
  source 1..15: mol_type = other DNA
gttgcagactatagc

SEQ ID NO: 897 - DNA, 12 bp, synthetic construct
  source 1..12: mol_type = other DNA
gcagactatagc

SEQ ID NO: 898-900 - skipped (3 entries)

SEQ ID NO: 901 - protein, 34 aa, synthetic construct; identical to SEQ ID NO: 368

SEQ ID NO: 902 - protein, 33 aa, synthetic construct; identical to SEQ ID NO: 369

SEQ ID NO: 903 - protein, 32 aa, synthetic construct; identical to SEQ ID NO: 370

SEQ ID NO: 904 - protein, 31 aa, synthetic construct; identical to SEQ ID NO: 371

SEQ ID NO: 905 - protein, 30 aa, synthetic construct; identical to SEQ ID NO: 372

SEQ ID NO: 906 - protein, 29 aa, synthetic construct
STNLVKNKCVNFNFNGLTGTGVLTESNKK

SEQ ID NO: 907 - protein, 28 aa, synthetic construct
STNLVKNKCVNFNFNGLTGTGVLTESNK

SEQ ID NO: 908 - protein, 27 aa, synthetic construct
STNLVKNKCVNFNFNGLTGTGVLTESN

SEQ ID NO: 909 - protein, 26 aa, synthetic construct
STNLVKNKCVNFNFNGLTGTGVLTES

SEQ ID NO: 910 - protein, 25 aa, synthetic construct
STNLVKNKCVNFNFNGLTGTGVLTE

SEQ ID NO: 911 - protein, 24 aa, synthetic construct
STNLVKNKCVNFNFNGLTGTGVLT

SEQ ID NO: 912 - protein, 23 aa, synthetic construct
STNLVKNKCVNFNFNGLTGTGVL

SEQ ID NO: 913 - protein, 22 aa, synthetic construct
STNLVKNKCVNFNFNGLTGTGV

SEQ ID NO: 914 - protein, 21 aa, synthetic construct
STNLVKNKCVNFNFNGLTGTG

SEQ ID NO: 915 - protein, 20 aa, synthetic construct
STNLVKNKCVNFNFNGLTGT

SEQ ID NO: 916 - protein, 19 aa, synthetic construct
STNLVKNKCVNFNFNGLTG

SEQ ID NO: 917 - protein, 18 aa, synthetic construct
STNLVKNKCVNFNFNGLT

SEQ ID NO: 918 - protein, 17 aa, synthetic construct
STNLVKNKCVNFNFNGL

SEQ ID NO: 919 - protein, 16 aa, synthetic construct
STNLVKNKCVNFNFNG

SEQ ID NO: 920 - protein, 15 aa, synthetic construct
STNLVKNKCVNFNFN

SEQ ID NO: 921 - protein, 14 aa, synthetic construct
STNLVKNKCVNFNF

SEQ ID NO: 922 - protein, 13 aa, synthetic construct
STNLVKNKCVNFN

SEQ ID NO: 923 - protein, 12 aa, synthetic construct
STNLVKNKCVNF

SEQ ID NO: 924 - protein, 11 aa, synthetic construct
STNLVKNKCVN

SEQ ID NO: 925 - protein, 10 aa, synthetic construct
STNLVKNKCV

SEQ ID NO: 926 - protein, 9 aa, synthetic construct
STNLVKNKC

SEQ ID NO: 927 - protein, 8 aa, synthetic construct
STNLVKNK

SEQ ID NO: 928 - protein, 7 aa, synthetic construct
STNLVKN

SEQ ID NO: 929 - protein, 6 aa, synthetic construct
STNLVK

SEQ ID NO: 930 - protein, 5 aa, synthetic construct
STNLV

SEQ ID NO: 931 - protein, 4 aa, synthetic construct
STNL

SEQ ID NO: 932-934 - skipped (3 entries)

SEQ ID NO: 935 - DNA, 102 bp, synthetic construct; identical to SEQ ID NO: 547
  source 1..102: mol_type = other DNA

SEQ ID NO: 936 - DNA, 99 bp, synthetic construct; identical to SEQ ID NO: 548
  source 1..99: mol_type = other DNA

SEQ ID NO: 937 - DNA, 96 bp, synthetic construct; identical to SEQ ID NO: 549
  source 1..96: mol_type = other DNA

SEQ ID NO: 938 - DNA, 93 bp, synthetic construct; identical to SEQ ID NO: 550
  source 1..93: mol_type = other DNA

SEQ ID NO: 939 - DNA, 90 bp, synthetic construct; identical to SEQ ID NO: 551
  source 1..90: mol_type = other DNA

SEQ ID NO: 940 - DNA, 87 bp, synthetic construct; identical to SEQ ID NO: 552
  source 1..87: mol_type = other DNA

SEQ ID NO: 941 - DNA, 84 bp, synthetic construct; identical to SEQ ID NO: 553
  source 1..84: mol_type = other DNA

SEQ ID NO: 942 - DNA, 81 bp, synthetic construct; identical to SEQ ID NO: 554
  source 1..81: mol_type = other DNA

SEQ ID NO: 943 - DNA, 78 bp, synthetic construct; identical to SEQ ID NO: 555
  source 1..78: mol_type = other DNA

SEQ ID NO: 944 - DNA, 75 bp, synthetic construct; identical to SEQ ID NO: 556
  source 1..75: mol_type = other DNA

SEQ ID NO: 945 - DNA, 72 bp, synthetic construct; identical to SEQ ID NO: 557
  source 1..72: mol_type = other DNA

SEQ ID NO: 946 - DNA, 69 bp, synthetic construct; identical to SEQ ID NO: 558
  source 1..69: mol_type = other DNA

SEQ ID NO: 947 - DNA, 66 bp, synthetic construct; identical to SEQ ID NO: 559
  source 1..66: mol_type = other DNA

SEQ ID NO: 948 - DNA, 63 bp, synthetic construct; identical to SEQ ID NO: 560
  source 1..63: mol_type = other DNA

SEQ ID NO: 949 - DNA, 60 bp, synthetic construct; identical to SEQ ID NO: 561
  source 1..60: mol_type = other DNA

SEQ ID NO: 950 - DNA, 57 bp, synthetic construct; identical to SEQ ID NO: 562
  source 1..57: mol_type = other DNA

SEQ ID NO: 951 - DNA, 54 bp, synthetic construct; identical to SEQ ID NO: 563
  source 1..54: mol_type = other DNA

SEQ ID NO: 952 - DNA, 51 bp, synthetic construct; identical to SEQ ID NO: 564
  source 1..51: mol_type = other DNA

SEQ ID NO: 953 - DNA, 48 bp, synthetic construct; identical to SEQ ID NO: 565
  source 1..48: mol_type = other DNA

SEQ ID NO: 954 - DNA, 45 bp, synthetic construct; identical to SEQ ID NO: 566
  source 1..45: mol_type = other DNA

SEQ ID NO: 955 - DNA, 42 bp, synthetic construct; identical to SEQ ID NO: 567
  source 1..42: mol_type = other DNA

SEQ ID NO: 956 - DNA, 39 bp, synthetic construct; identical to SEQ ID NO: 568
  source 1..39: mol_type = other DNA

SEQ ID NO: 957 - DNA, 36 bp, synthetic construct; identical to SEQ ID NO: 569
  source 1..36: mol_type = other DNA

SEQ ID NO: 958 - DNA, 33 bp, synthetic construct; identical to SEQ ID NO: 570
  source 1..33: mol_type = other DNA

SEQ ID NO: 959 - DNA, 30 bp, synthetic construct; identical to SEQ ID NO: 571
  source 1..30: mol_type = other DNA

SEQ ID NO: 960 - DNA, 27 bp, synthetic construct
  source 1..27: mol_type = other DNA
tccactaatcttgtaaaaaacaaatgc

SEQ ID NO: 961 - DNA, 24 bp, synthetic construct
  source 1..24: mol_type = other DNA
tccactaatcttgtaaaaaacaaa

SEQ ID NO: 962 - DNA, 21 bp, synthetic construct
  source 1..21: mol_type = other DNA
tccactaatcttgtaaaaaac

SEQ ID NO: 963 - DNA, 18 bp, synthetic construct
  source 1..18: mol_type = other DNA
tccactaatcttgtaaaa

SEQ ID NO: 964 - DNA, 15 bp, synthetic construct
  source 1..15: mol_type = other DNA
tccactaatcttgta

SEQ ID NO: 965 - DNA, 12 bp, synthetic construct
  source 1..12: mol_type = other DNA
tccactaatctt

SEQ ID NO: 966-968 - skipped (3 entries)

SEQ ID NO: 969 - protein, 43 aa, synthetic construct; identical to SEQ ID NO: 298

SEQ ID NO: 970 - protein, 42 aa, synthetic construct; identical to SEQ ID NO: 299

SEQ ID NO: 971 - protein, 41 aa, synthetic construct; identical to SEQ ID NO: 300

SEQ ID NO: 972 - protein, 40 aa, synthetic construct; identical to SEQ ID NO: 301

SEQ ID NO: 973 - protein, 39 aa, synthetic construct; identical to SEQ ID NO: 302

SEQ ID NO: 974 - protein, 38 aa, synthetic construct; identical to SEQ ID NO: 303

SEQ ID NO: 975 - protein, 37 aa, synthetic construct; identical to SEQ ID NO: 304

SEQ ID NO: 976 - protein, 36 aa, synthetic construct; identical to SEQ ID NO: 305

SEQ ID NO: 977 - protein, 35 aa, synthetic construct; identical to SEQ ID NO: 306

SEQ ID NO: 978 - protein, 34 aa, synthetic construct; identical to SEQ ID NO: 307

SEQ ID NO: 979 - protein, 33 aa, synthetic construct; identical to SEQ ID NO: 308

SEQ ID NO: 980 - protein, 32 aa, synthetic construct; identical to SEQ ID NO: 309

SEQ ID NO: 981 - protein, 31 aa, synthetic construct; identical to SEQ ID NO: 310

SEQ ID NO: 982 - protein, 30 aa, synthetic construct; identical to SEQ ID NO: 311

SEQ ID NO: 983 - protein, 29 aa, synthetic construct
FDEVFNATRFASVYAWNRKRISNCVADYS

SEQ ID NO: 984 - protein, 28 aa, synthetic construct
DEVFNATRFASVYAWNRKRISNCVADYS

SEQ ID NO: 985 - DNA, 129 bp, synthetic construct; identical to SEQ ID NO: 477
  source 1..129: mol_type = other DNA

SEQ ID NO: 986 - DNA, 126 bp, synthetic construct; identical to SEQ ID NO: 478
  source 1..126: mol_type = other DNA

SEQ ID NO: 987 - DNA, 123 bp, synthetic construct; identical to SEQ ID NO: 479
  source 1..123: mol_type = other DNA

SEQ ID NO: 988 - DNA, 120 bp, synthetic construct; identical to SEQ ID NO: 480
  source 1..120: mol_type = other DNA

SEQ ID NO: 989 - DNA, 117 bp, synthetic construct; identical to SEQ ID NO: 481
  source 1..117: mol_type = other DNA

SEQ ID NO: 990 - DNA, 114 bp, synthetic construct; identical to SEQ ID NO: 482
  source 1..114: mol_type = other DNA

SEQ ID NO: 991 - DNA, 111 bp, synthetic construct; identical to SEQ ID NO: 483
  source 1..111: mol_type = other DNA

SEQ ID NO: 992 - DNA, 108 bp, synthetic construct; identical to SEQ ID NO: 484
  source 1..108: mol_type = other DNA

SEQ ID NO: 993 - DNA, 105 bp, synthetic construct; identical to SEQ ID NO: 485
  source 1..105: mol_type = other DNA

SEQ ID NO: 994 - DNA, 102 bp, synthetic construct; identical to SEQ ID NO: 486
  source 1..102: mol_type = other DNA

SEQ ID NO: 995 - DNA, 99 bp, synthetic construct; identical to SEQ ID NO: 487
  source 1..99: mol_type = other DNA

SEQ ID NO: 996 - DNA, 96 bp, synthetic construct; identical to SEQ ID NO: 488
  source 1..96: mol_type = other DNA

SEQ ID NO: 997 - DNA, 93 bp, synthetic construct; identical to SEQ ID NO: 489
  source 1..93: mol_type = other DNA

SEQ ID NO: 998 - DNA, 90 bp, synthetic construct; identical to SEQ ID NO: 490
  source 1..90: mol_type = other DNA

SEQ ID NO: 999 - DNA, 87 bp, synthetic construct; identical to SEQ ID NO: 491
  source 1..87: mol_type = other DNA

SEQ ID NO: 1000 - DNA, 84 bp, synthetic construct; identical to SEQ ID NO: 492
  source 1..84: mol_type = other DNA

SEQ ID NO: 1001 - protein, 43 aa, synthetic construct; identical to SEQ ID NO: 319

SEQ ID NO: 1002 - protein, 42 aa, synthetic construct; identical to SEQ ID NO: 320

SEQ ID NO: 1003 - protein, 41 aa, synthetic construct; identical to SEQ ID NO: 321

SEQ ID NO: 1004 - protein, 40 aa, synthetic construct; identical to SEQ ID NO: 322

SEQ ID NO: 1005 - protein, 39 aa, synthetic construct; identical to SEQ ID NO: 323

SEQ ID NO: 1006 - protein, 38 aa, synthetic construct; identical to SEQ ID NO: 324

SEQ ID NO: 1007 - protein, 37 aa, synthetic construct; identical to SEQ ID NO: 325

SEQ ID NO: 1008 - protein, 36 aa, synthetic construct; identical to SEQ ID NO: 326

SEQ ID NO: 1009 - protein, 35 aa, synthetic construct; identical to SEQ ID NO: 327

SEQ ID NO: 1010 - protein, 34 aa, synthetic construct; identical to SEQ ID NO: 328

SEQ ID NO: 1011 - protein, 33 aa, synthetic construct; identical to SEQ ID NO: 329

SEQ ID NO: 1012 - protein, 32 aa, synthetic construct; identical to SEQ ID NO: 330

SEQ ID NO: 1013 - protein, 31 aa, synthetic construct; identical to SEQ ID NO: 331

SEQ ID NO: 1014 - protein, 30 aa, synthetic construct; identical to SEQ ID NO: 332

SEQ ID NO: 1015 - protein, 29 aa, synthetic construct
FGEVFNATKFASVYAWNRKRISNCVADYS

SEQ ID NO: 1016 - protein, 28 aa, synthetic construct
GEVFNATKFASVYAWNRKRISNCVADYS

SEQ ID NO: 1017 - protein, 27 aa, synthetic construct
EVFNATKFASVYAWNRKRISNCVADYS

SEQ ID NO: 1018 - protein, 26 aa, synthetic construct
VFNATKFASVYAWNRKRISNCVADYS

SEQ ID NO: 1019 - protein, 25 aa, synthetic construct
FNATKFASVYAWNRKRISNCVADYS

SEQ ID NO: 1020 - protein, 24 aa, synthetic construct
NATKFASVYAWNRKRISNCVADYS

SEQ ID NO: 1021 - protein, 23 aa, synthetic construct
ATKFASVYAWNRKRISNCVADYS

SEQ ID NO: 1022 - protein, 22 aa, synthetic construct
TKFASVYAWNRKRISNCVADYS

SEQ ID NO: 1023 - protein, 21 aa, synthetic construct
KFASVYAWNRKRISNCVADYS

SEQ ID NO: 1024 - DNA, 129 bp, synthetic construct; identical to SEQ ID NO: 429
  source 1..129: mol_type = other DNA

SEQ ID NO: 1025 - DNA, 126 bp, synthetic construct; identical to SEQ ID NO: 499
  source 1..126: mol_type = other DNA

SEQ ID NO: 1026 - DNA, 123 bp, synthetic construct; identical to SEQ ID NO: 500
  source 1..123: mol_type = other DNA

SEQ ID NO: 1027 - DNA, 120 bp, synthetic construct; identical to SEQ ID NO: 501
  source 1..120: mol_type = other DNA

SEQ ID NO: 1028 - DNA, 117 bp, synthetic construct; identical to SEQ ID NO: 502
  source 1..117: mol_type = other DNA

SEQ ID NO: 1029 - DNA, 114 bp, synthetic construct; identical to SEQ ID NO: 503
  source 1..114: mol_type = other DNA

SEQ ID NO: 1030 - DNA, 111 bp, synthetic construct; identical to SEQ ID NO: 504
  source 1..111: mol_type = other DNA

SEQ ID NO: 1031 - DNA, 108 bp, synthetic construct; identical to SEQ ID NO: 505
  source 1..108: mol_type = other DNA

SEQ ID NO: 1032 - DNA, 105 bp, synthetic construct; identical to SEQ ID NO: 506
  source 1..105: mol_type = other DNA

SEQ ID NO: 1033 - DNA, 102 bp, synthetic construct; identical to SEQ ID NO: 507
  source 1..102: mol_type = other DNA

SEQ ID NO: 1034 - DNA, 99 bp, synthetic construct; identical to SEQ ID NO: 508
  source 1..99: mol_type = other DNA

SEQ ID NO: 1035 - DNA, 96 bp, synthetic construct; identical to SEQ ID NO: 509
  source 1..96: mol_type = other DNA

SEQ ID NO: 1036 - DNA, 93 bp, synthetic construct; identical to SEQ ID NO: 510
  source 1..93: mol_type = other DNA

SEQ ID NO: 1037 - DNA, 90 bp, synthetic construct; identical to SEQ ID NO: 511
  source 1..90: mol_type = other DNA

SEQ ID NO: 1038 - DNA, 87 bp, synthetic construct; identical to SEQ ID NO: 512
  source 1..87: mol_type = other DNA

SEQ ID NO: 1039 - DNA, 84 bp, synthetic construct; identical to SEQ ID NO: 513
  source 1..84: mol_type = other DNA

SEQ ID NO: 1040 - DNA, 81 bp, synthetic construct; identical to SEQ ID NO: 514
  source 1..81: mol_type = other DNA

SEQ ID NO: 1041 - DNA, 78 bp, synthetic construct; identical to SEQ ID NO: 515
  source 1..78: mol_type = other DNA

SEQ ID NO: 1042 - DNA, 75 bp, synthetic construct; identical to SEQ ID NO: 516
  source 1..75: mol_type = other DNA

SEQ ID NO: 1043 - DNA, 72 bp, synthetic construct; identical to SEQ ID NO: 517
  source 1..72: mol_type = other DNA

SEQ ID NO: 1044 - DNA, 69 bp, synthetic construct; identical to SEQ ID NO: 518
  source 1..69: mol_type = other DNA

SEQ ID NO: 1045 - DNA, 66 bp, synthetic construct; identical to SEQ ID NO: 519
  source 1..66: mol_type = other DNA

SEQ ID NO: 1046 - DNA, 63 bp, synthetic construct; identical to SEQ ID NO: 520
  source 1..63: mol_type = other DNA

SEQ ID NO: 1047 - protein, 43 aa, synthetic construct; identical to SEQ ID NO: 347

SEQ ID NO: 1048 - protein, 42 aa, synthetic construct; identical to SEQ ID NO: 348

SEQ ID NO: 1049 - protein, 41 aa, synthetic construct; identical to SEQ ID NO: 349

SEQ ID NO: 1050 - protein, 40 aa, synthetic construct; identical to SEQ ID NO: 350

SEQ ID NO: 1051 - protein, 39 aa, synthetic construct; identical to SEQ ID NO: 351

SEQ ID NO: 1052 - protein, 38 aa, synthetic construct; identical to SEQ ID NO: 352

SEQ ID NO: 1053 - protein, 37 aa, synthetic construct; identical to SEQ ID NO: 353

SEQ ID NO: 1054 - protein, 36 aa, synthetic construct; identical to SEQ ID NO: 354

SEQ ID NO: 1055 - protein, 35 aa, synthetic construct; identical to SEQ ID NO: 355

SEQ ID NO: 1056 - protein, 34 aa, synthetic construct; identical to SEQ ID NO: 356

SEQ ID NO: 1057 - protein, 33 aa, synthetic construct; identical to SEQ ID NO: 357

SEQ ID NO: 1058 - protein, 32 aa, synthetic construct; identical to SEQ ID NO: 358

SEQ ID NO: 1059 - protein, 31 aa, synthetic construct; identical to SEQ ID NO: 359

SEQ ID NO: 1060 - protein, 30 aa, synthetic construct; identical to SEQ ID NO: 360

SEQ ID NO: 1061 - protein, 29 aa, synthetic construct
FDEVFNATKFASVYAWNRKRISNCVADYS

SEQ ID NO: 1062 - protein, 28 aa, synthetic construct
DEVFNATKFASVYAWNRKRISNCVADYS

SEQ ID NO: 1063 - DNA, 129 bp, synthetic construct; identical to SEQ ID NO: 526
  source 1..129: mol_type = other DNA

SEQ ID NO: 1064 - DNA, 126 bp, synthetic construct; identical to SEQ ID NO: 527
  source 1..126: mol_type = other DNA

SEQ ID NO: 1065 - DNA, 123 bp, synthetic construct; identical to SEQ ID NO: 528
  source 1..123: mol_type = other DNA

SEQ ID NO: 1066 - DNA, 120 bp, synthetic construct; identical to SEQ ID NO: 529
  source 1..120: mol_type = other DNA

SEQ ID NO: 1067 - DNA, 117 bp, synthetic construct; identical to SEQ ID NO: 530
  source 1..117: mol_type = other DNA

SEQ ID NO: 1068 - DNA, 114 bp, synthetic construct; identical to SEQ ID NO: 531
  source 1..114: mol_type = other DNA

SEQ ID NO: 1069 - DNA, 111 bp, synthetic construct; identical to SEQ ID NO: 532
  source 1..111: mol_type = other DNA

SEQ ID NO: 1070 - DNA, 108 bp, synthetic construct; identical to SEQ ID NO: 533
  source 1..108: mol_type = other DNA

SEQ ID NO: 1071 - DNA, 105 bp, synthetic construct; identical to SEQ ID NO: 534
  source 1..105: mol_type = other DNA

SEQ ID NO: 1072 - DNA, 102 bp, synthetic construct; identical to SEQ ID NO: 535
  source 1..102: mol_type = other DNA

SEQ ID NO: 1073 - DNA, 99 bp, synthetic construct; identical to SEQ ID NO: 536
  source 1..99: mol_type = other DNA

SEQ ID NO: 1074 - DNA, 96 bp, synthetic construct; identical to SEQ ID NO: 537
  source 1..96: mol_type = other DNA

SEQ ID NO: 1075 - DNA, 93 bp, synthetic construct; identical to SEQ ID NO: 538
  source 1..93: mol_type = other DNA

SEQ ID NO: 1076 - DNA, 90 bp, synthetic construct; identical to SEQ ID NO: 539
  source 1..90: mol_type = other DNA

SEQ ID NO: 1077 - DNA, 87 bp, synthetic construct; identical to SEQ ID NO: 540
  source 1..87: mol_type = other DNA

SEQ ID NO: 1078 - DNA, 84 bp, synthetic construct; identical to SEQ ID NO: 541
  source 1..84: mol_type = other DNA

SEQ ID NO: 1079 - protein, 33 aa, synthetic construct
TNLVKNKCVNFNFNGLKGTGVLTESNKKFLPFQ

SEQ ID NO: 1080 - protein, 32 aa, synthetic construct
TNLVKNKCVNFNFNGLKGTGVLTESNKKFLPF

SEQ ID NO: 1081 - protein, 31 aa, synthetic construct
TNLVKNKCVNFNFNGLKGTGVLTESNKKFLP

SEQ ID NO: 1082 - protein, 30 aa, synthetic construct
TNLVKNKCVNFNFNGLKGTGVLTESNKKFL

SEQ ID NO: 1083 - protein, 29 aa, synthetic construct
TNLVKNKCVNFNFNGLKGTGVLTESNKKF

SEQ ID NO: 1084 - protein, 28 aa, synthetic construct
TNLVKNKCVNFNFNGLKGTGVLTESNKK

SEQ ID NO: 1085 - protein, 27 aa, synthetic construct
TNLVKNKCVNFNFNGLKGTGVLTESNK

SEQ ID NO: 1086 - protein, 26 aa, synthetic construct
TNLVKNKCVNFNFNGLKGTGVLTESN

SEQ ID NO: 1087 - protein, 25 aa, synthetic construct
TNLVKNKCVNFNFNGLKGTGVLTES

SEQ ID NO: 1088 - protein, 24 aa, synthetic construct
TNLVKNKCVNFNFNGLKGTGVLTE

SEQ ID NO: 1089 - protein, 23 aa, synthetic construct
TNLVKNKCVNFNFNGLKGTGVLT

SEQ ID NO: 1090 - protein, 22 aa, synthetic construct
TNLVKNKCVNFNFNGLKGTGVL

SEQ ID NO: 1091 - protein, 21 aa, synthetic construct
TNLVKNKCVNFNFNGLKGTGV

SEQ ID NO: 1092 - protein, 20 aa, synthetic construct
TNLVKNKCVNFNFNGLKGTG

SEQ ID NO: 1093 - protein, 19 aa, synthetic construct
TNLVKNKCVNFNFNGLKGT

SEQ ID NO: 1094 - protein, 18 aa, synthetic construct
TNLVKNKCVNFNFNGLKG

SEQ ID NO: 1095 - protein, 17 aa, synthetic construct
TNLVKNKCVNFNFNGLK

SEQ ID NO: 1096 - DNA, 99 bp, synthetic construct
  source 1..99: mol_type = other DNA
actaatcttgtaaaaaacaaatgcgtgaacttcaatttcaatggcctcaaaggaacaggtgttttgacagaatctaacaaaaaattccttcccttccag

SEQ ID NO: 1097 - DNA, 96 bp, synthetic construct
  source 1..96: mol_type = other DNA
actaatcttgtaaaaaacaaatgcgtgaacttcaatttcaatggcctcaaaggaacaggtgttttgacagaatctaacaaaaaattccttcccttc

SEQ ID NO: 1098 - DNA, 93 bp, synthetic construct
  source 1..93: mol_type = other DNA
actaatcttgtaaaaaacaaatgcgtgaacttcaatttcaatggcctcaaaggaacaggtgttttgacagaatctaacaaaaaattccttccc

SEQ ID NO: 1099 - DNA, 90 bp, synthetic construct
  source 1..90: mol_type = other DNA
actaatcttgtaaaaaacaaatgcgtgaacttcaatttcaatggcctcaaaggaacaggtgttttgacagaatctaacaaaaaattcctt

SEQ ID NO: 1100 - DNA, 87 bp, synthetic construct
  source 1..87: mol_type = other DNA
actaatcttgtaaaaaacaaatgcgtgaacttcaatttcaatggcctcaaaggaacaggtgttttgacagaatctaacaaaaaattc

SEQ ID NO: 1101 - DNA, 84 bp, synthetic construct
  source 1..84: mol_type = other DNA
actaatcttgtaaaaaacaaatgcgtgaacttcaatttcaatggcctcaaaggaacaggtgttttgacagaatctaacaaaaaa

SEQ ID NO: 1102 - DNA, 81 bp, synthetic construct
  source 1..81: mol_type = other DNA
actaatcttgtaaaaaacaaatgcgtgaacttcaatttcaatggcctcaaaggaacaggtgttttgacagaatctaacaaa

SEQ ID NO: 1103 - DNA, 78 bp, synthetic construct
  source 1..78: mol_type = other DNA
actaatcttgtaaaaaacaaatgcgtgaacttcaatttcaatggcctcaaaggaacaggtgttttgacagaatctaac

SEQ ID NO: 1104 - DNA, 75 bp, synthetic construct
  source 1..75: mol_type = other DNA
actaatcttgtaaaaaacaaatgcgtgaacttcaatttcaatggcctcaaaggaacaggtgttttgacagaatct

SEQ ID NO: 1105 - DNA, 72 bp, synthetic construct
  source 1..72: mol_type = other DNA
actaatcttgtaaaaaacaaatgcgtgaacttcaatttcaatggcctcaaaggaacaggtgttttgacagaa

SEQ ID NO: 1106 - DNA, 69 bp, synthetic construct
  source 1..69: mol_type = other DNA
actaatcttgtaaaaaacaaatgcgtgaacttcaatttcaatggcctcaaaggaacaggtgttttgaca

SEQ ID NO: 1107 - DNA, 66 bp, synthetic construct
  source 1..66: mol_type = other DNA
actaatcttgtaaaaaacaaatgcgtgaacttcaatttcaatggcctcaaaggaacaggtgttttg

SEQ ID NO: 1108 - DNA, 63 bp, synthetic construct
  source 1..63: mol_type = other DNA
actaatcttgtaaaaaacaaatgcgtgaacttcaatttcaatggcctcaaaggaacaggtgtt

SEQ ID NO: 1109 - DNA, 60 bp, synthetic construct
  source 1..60: mol_type = other DNA
actaatcttgtaaaaaacaaatgcgtgaacttcaatttcaatggcctcaaaggaacaggt

SEQ ID NO: 1110 - DNA, 57 bp, synthetic construct
  source 1..57: mol_type = other DNA
actaatcttgtaaaaaacaaatgcgtgaacttcaatttcaatggcctcaaaggaaca

SEQ ID NO: 1111 - DNA, 54 bp, synthetic construct
  source 1..54: mol_type = other DNA
actaatcttgtaaaaaacaaatgcgtgaacttcaatttcaatggcctcaaagga

SEQ ID NO: 1112 - DNA, 51 bp, synthetic construct
  source 1..51: mol_type = other DNA
actaatcttgtaaaaaacaaatgcgtgaacttcaatttcaatggcctcaaa

SEQ ID NO: 1113 - protein, 8 aa, synthetic construct
RVQPTESI

SEQ ID NO: 1114 - protein, 8 aa, synthetic construct
VQPTESIV

SEQ ID NO: 1115 - protein, 8 aa, synthetic construct
QPTESIVR

SEQ ID NO: 1116 - protein, 8 aa, synthetic construct
PTESIVRF

SEQ ID NO: 1117 - protein, 8 aa, synthetic construct
TESIVRFP

SEQ ID NO: 1118 - protein, 8 aa, synthetic construct
ESIVRFPN

SEQ ID NO: 1119 - protein, 8 aa, synthetic construct
SIVRFPNI

SEQ ID NO: 1120 - protein, 8 aa, synthetic construct
IVRFPNIT

SEQ ID NO: 1121 - protein, 8 aa, synthetic construct
VRFPNITN

SEQ ID NO: 1122 - protein, 8 aa, synthetic construct
RFPNITNL

SEQ ID NO: 1123 - protein, 8 aa, synthetic construct
FPNITNLC

SEQ ID NO: 1124 - protein, 8 aa, synthetic construct
PNITNLCP

SEQ ID NO: 1125 - protein, 8 aa, synthetic construct
NITNLCPF

SEQ ID NO: 1126 - protein, 8 aa, synthetic construct
ITNLCPFG

SEQ ID NO: 1127 - protein, 8 aa, synthetic construct
TNLCPFGE

SEQ ID NO: 1128 - protein, 8 aa, synthetic construct
NLCPFGEV

SEQ ID NO: 1129 - protein, 8 aa, synthetic construct
LCPFGEVF

SEQ ID NO: 1130 - protein, 8 aa, synthetic construct
CPFGEVFN

SEQ ID NO: 1131 - protein, 8 aa, synthetic construct
PFGEVFNA

SEQ ID NO: 1132 - protein, 8 aa, synthetic construct
FGEVFNAT

SEQ ID NO: 1133 - protein, 8 aa, synthetic construct
GEVFNATR

SEQ ID NO: 1134 - protein, 8 aa, synthetic construct
EVFNATRF

SEQ ID NO: 1135 - protein, 8 aa, synthetic construct
VFNATRFA

SEQ ID NO: 1136 - protein, 8 aa, synthetic construct
FNATRFAS

SEQ ID NO: 1137 - protein, 8 aa, synthetic construct
NATRFASV

SEQ ID NO: 1138 - protein, 8 aa, synthetic construct
ATRFASVY

SEQ ID NO: 1139 - protein, 8 aa, synthetic construct
TRFASVYA

SEQ ID NO: 1140 - protein, 8 aa, synthetic construct
RFASVYAW

SEQ ID NO: 1141 - protein, 8 aa, synthetic construct
FASVYAWN

SEQ ID NO: 1142 - protein, 8 aa, synthetic construct
ASVYAWNR

SEQ ID NO: 1143 - protein, 8 aa, synthetic construct
SVYAWNRK

SEQ ID NO: 1144 - protein, 8 aa, synthetic construct
VYAWNRKR

SEQ ID NO: 1145 - protein, 8 aa, synthetic construct
YAWNRKRI

SEQ ID NO: 1146 - protein, 8 aa, synthetic construct
AWNRKRIS

SEQ ID NO: 1147 - protein, 8 aa, synthetic construct
WNRKRISN

SEQ ID NO: 1148 - protein, 8 aa, synthetic construct
NRKRISNC

SEQ ID NO: 1149 - protein, 8 aa, synthetic construct
RKRISNCV

SEQ ID NO: 1150 - protein, 8 aa, synthetic construct
KRISNCVA

SEQ ID NO: 1151 - protein, 8 aa, synthetic construct
RISNCVAD

SEQ ID NO: 1152 - protein, 8 aa, synthetic construct
ISNCVADY

SEQ ID NO: 1153 - protein, 8 aa, synthetic construct
SNCVADYS

SEQ ID NO: 1154 - protein, 8 aa, synthetic construct
NCVADYSV

SEQ ID NO: 1155 - protein, 8 aa, synthetic construct
CVADYSVL

SEQ ID NO: 1156 - protein, 8 aa, synthetic construct
VADYSVLY

SEQ ID NO: 1157 - protein, 8 aa, synthetic construct
ADYSVLYN

SEQ ID NO: 1158 - protein, 8 aa, synthetic construct
DYSVLYNS

SEQ ID NO: 1159 - protein, 8 aa, synthetic construct
YSVLYNSA

SEQ ID NO: 1160 - protein, 8 aa, synthetic construct
SVLYNSAS

SEQ ID NO: 1161 - protein, 8 aa, synthetic construct
ITNLCPFD

SEQ ID NO: 1162 - protein, 8 aa, synthetic construct
TNLCPFDE

SEQ ID NO: 1163 - protein, 8 aa, synthetic construct
NLCPFDEV

SEQ ID NO: 1164 - protein, 8 aa, synthetic construct
LCPFDEVF

SEQ ID NO: 1165 - protein, 8 aa, synthetic construct
CPFDEVFN

SEQ ID NO: 1166 - protein, 8 aa, synthetic construct
PFDEVFNA

SEQ ID NO: 1167 - protein, 8 aa, synthetic construct
FDEVFNAT

SEQ ID NO: 1168 - protein, 8 aa, synthetic construct
DEVFNATR

SEQ ID NO: 1169 - protein, 8 aa, synthetic construct
DEVFNATK

SEQ ID NO: 1170 - protein, 8 aa, synthetic construct
GEVFNATK

SEQ ID NO: 1171 - protein, 8 aa, synthetic construct
EVFNATKF

SEQ ID NO: 1172 - protein, 8 aa, synthetic construct
VFNATKFA

SEQ ID NO: 1173 - protein, 8 aa, synthetic construct
FNATKFAS

SEQ ID NO: 1174 - protein, 8 aa, synthetic construct
NATKFASV

SEQ ID NO: 1175 - protein, 8 aa, synthetic construct
ATKFASVY

SEQ ID NO: 1176 - protein, 8 aa, synthetic construct
TKFASVYA

SEQ ID NO: 1177 - protein, 8 aa, synthetic construct
KFASVYAW

SEQ ID NO: 1178 - protein, 8 aa, synthetic construct
PFQQFGRD

SEQ ID NO: 1179 - protein, 8 aa, synthetic construct
LPFQQFGR

SEQ ID NO: 1180 - protein, 8 aa, synthetic construct
FLPFQQFG

SEQ ID NO: 1181 - protein, 8 aa, synthetic construct
KFLPFQQF

SEQ ID NO: 1182 - protein, 8 aa, synthetic construct
KKFLPFQQ

SEQ ID NO: 1183 - protein, 8 aa, synthetic construct
NKKFLPFQ

SEQ ID NO: 1184 - protein, 8 aa, synthetic construct
SNKKFLPF

SEQ ID NO: 1185 - protein, 8 aa, synthetic construct
ESNKKFLP

SEQ ID NO: 1186 - protein, 8 aa, synthetic construct
TESNKKFL

SEQ ID NO: 1187 - protein, 8 aa, synthetic construct
LTESNKKF

SEQ ID NO: 1188 - protein, 8 aa, synthetic construct
VLTESNKK

SEQ ID NO: 1189 - protein, 8 aa, synthetic construct
GVLTESNK

SEQ ID NO: 1190 - protein, 8 aa, synthetic construct
TGVLTESN

SEQ ID NO: 1191 - protein, 8 aa, synthetic construct
GTGVLTES

SEQ ID NO: 1192 - protein, 8 aa, synthetic construct
TGTGVLTE

SEQ ID NO: 1193 - protein, 8 aa, synthetic construct
LTGTGVLT

SEQ ID NO: 1194 - protein, 8 aa, synthetic construct
GLTGTGVL

SEQ ID NO: 1195 - protein, 8 aa, synthetic construct
NGLTGTGV

SEQ ID NO: 1196 - protein, 8 aa, synthetic construct
FNGLTGTG

SEQ ID NO: 1197 - protein, 8 aa, synthetic construct
NFNGLTGT

SEQ ID NO: 1198 - protein, 8 aa, synthetic construct
FNFNGLTG

SEQ ID NO: 1199 - protein, 8 aa, synthetic construct
NFNFNGLT

SEQ ID NO: 1200 - protein, 8 aa, synthetic construct
VNFNFNGL

SEQ ID NO: 1201 - protein, 8 aa, synthetic construct
CVNFNFNG

SEQ ID NO: 1202 - protein, 8 aa, synthetic construct
KCVNFNFN

SEQ ID NO: 1203 - protein, 8 aa, synthetic construct
NKCVNFNF

SEQ ID NO: 1204 - protein, 8 aa, synthetic construct
KNKCVNFN

SEQ ID NO: 1205 - protein, 8 aa, synthetic construct
VKNKCVNF

SEQ ID NO: 1206 - protein, 8 aa, synthetic construct
LVKNKCVN

SEQ ID NO: 1207 - protein, 8 aa, synthetic construct
NLVKNKCV

SEQ ID NO: 1208 - protein, 8 aa, synthetic construct
TNLVKNKC

SEQ ID NO: 1209 - protein, 8 aa, synthetic construct
STNLVKNK

SEQ ID NO: 1210 - protein, 8 aa, synthetic construct
KSTNLVKN

SEQ ID NO: 1211 - protein, 8 aa, synthetic construct
KKSTNLVK

SEQ ID NO: 1212 - protein, 8 aa, synthetic construct
PKKSTNLV

SEQ ID NO: 1213 - protein, 8 aa, synthetic construct
GPKKSTNL

SEQ ID NO: 1214 - protein, 8 aa, synthetic construct
CGPKKSTN

SEQ ID NO: 1215 - protein, 8 aa, synthetic construct
VCGPKKST

SEQ ID NO: 1216 - protein, 8 aa, synthetic construct
TVCGPKKS

SEQ ID NO: 1217 - protein, 8 aa, synthetic construct
KGTGVLTE

SEQ ID NO: 1218 - protein, 8 aa, synthetic construct
LKGTGVLT

SEQ ID NO: 1219 - protein, 8 aa, synthetic construct
GLKGTGVL

SEQ ID NO: 1220 - protein, 8 aa, synthetic construct
NGLKGTGV

SEQ ID NO: 1221 - protein, 8 aa, synthetic construct
FNGLKGTG

SEQ ID NO: 1222 - protein, 8 aa, synthetic construct
NFNGLKGT

SEQ ID NO: 1223 - protein, 8 aa, synthetic construct
FNFNGLKG

SEQ ID NO: 1224 - protein, 8 aa, synthetic construct
NFNFNGLK

SEQ ID NO: 1225 - DNA, 24 bp, synthetic construct
  source 1..24: mol_type = other DNA
agggttcagcccaccgaatcaata

SEQ ID NO: 1226 - DNA, 24 bp, synthetic construct
  source 1..24: mol_type = other DNA
gttcagcccaccgaatcaatagta

SEQ ID NO: 1227 - DNA, 24 bp, synthetic construct
  source 1..24: mol_type = other DNA
cagcccaccgaatcaatagtacgg

SEQ ID NO: 1228 - DNA, 24 bp, synthetic construct
  source 1..24: mol_type = other DNA
cccaccgaatcaatagtacggttc

SEQ ID NO: 1229 - DNA, 24 bp, synthetic construct
  source 1..24: mol_type = other DNA
accgaatcaatagtacggttccca

SEQ ID NO: 1230 - DNA, 24 bp, synthetic construct
  source 1..24: mol_type = other DNA
gaatcaatagtacggttcccaaat

SEQ ID NO: 1231 - DNA, 24 bp, synthetic construct
  source 1..24: mol_type = other DNA
tcaatagtacggttcccaaatatc

SEQ ID NO: 1232 - DNA, 24 bp, synthetic construct
  source 1..24: mol_type = other DNA
atagtacggttcccaaatatcact

SEQ ID NO: 1233 - DNA, 24 bp, synthetic construct
  source 1..24: mol_type = other DNA
gtacggttcccaaatatcactaat

SEQ ID NO: 1234 - DNA, 24 bp, synthetic construct
  source 1..24: mol_type = other DNA
cggttcccaaatatcactaatctt

SEQ ID NO: 1235 - DNA, 24 bp, synthetic construct
  source 1..24: mol_type = other DNA
ttcccaaatatcactaatctttgc

SEQ ID NO: 1236 - DNA, 24 bp, synthetic construct
  source 1..24: mol_type = other DNA
ccaaatatcactaatctttgcccc

SEQ ID NO: 1237 - DNA, 24 bp, synthetic construct
  source 1..24: mol_type = other DNA
aatatcactaatctttgccccttc

SEQ ID NO: 1238 - DNA, 24 bp, synthetic construct
  source 1..24: mol_type = other DNA
atcactaatctttgccccttcggg

SEQ ID NO: 1239 - DNA, 24 bp, synthetic construct
  source 1..24: mol_type = other DNA
actaatctttgccccttcggggaa

SEQ ID NO: 1240 - DNA, 24 bp, synthetic construct
  source 1..24: mol_type = other DNA
aatctttgccccttcggggaagta

SEQ ID NO: 1241 - DNA, 24 bp, synthetic construct
  source 1..24: mol_type = other DNA
ctttgccccttcggggaagtattt

SEQ ID NO: 1242 - DNA, 24 bp, synthetic construct
  source 1..24: mol_type = other DNA
tgccccttcggggaagtatttaac

SEQ ID NO: 1243 - DNA, 24 bp, synthetic construct
  source 1..24: mol_type = other DNA
cccttcggggaagtatttaacgct

SEQ ID NO: 1244 - DNA, 24 bp, synthetic construct
  source 1..24: mol_type = other DNA
ttcggggaagtatttaacgctact

SEQ ID NO: 1245 - DNA, 24 bp, synthetic construct
  source 1..24: mol_type = other DNA
ggggaagtatttaacgctactcga

SEQ ID NO: 1246 - DNA, 24 bp, synthetic construct
  source 1..24: mol_type = other DNA
gaagtatttaacgctactcgattt

SEQ ID NO: 1247 - DNA, 24 bp, synthetic construct
  source 1..24: mol_type = other DNA
gtatttaacgctactcgatttgct

SEQ ID NO: 1248 - DNA, 24 bp, synthetic construct
  source 1..24: mol_type = other DNA
tttaacgctactcgatttgctagc

SEQ ID NO: 1249 - DNA, 24 bp, synthetic construct
  source 1..24: mol_type = other DNA
aacgctactcgatttgctagcgta

SEQ ID NO: 1250 - DNA, 24 bp, synthetic construct
  source 1..24: mol_type = other DNA
gctactcgatttgctagcgtatat

SEQ ID NO: 1251 - DNA, 24 bp, synthetic construct
  source 1..24: mol_type = other DNA
actcgatttgctagcgtatatgcc

SEQ ID NO: 1252 - DNA, 24 bp, synthetic construct
  source 1..24: mol_type = other DNA
cgatttgctagcgtatatgcctgg

SEQ ID NO: 1253 - DNA, 24 bp, synthetic construct
  source 1..24: mol_type = other DNA
tttgctagcgtatatgcctggaac

SEQ ID NO: 1254 - DNA, 24 bp, synthetic construct
  source 1..24: mol_type = other DNA
gctagcgtatatgcctggaaccgg

SEQ ID NO: 1255 - DNA, 24 bp, synthetic construct
  source 1..24: mol_type = other DNA
agcgtatatgcctggaaccggaag

SEQ ID NO: 1256 - DNA, 24 bp, synthetic construct
  source 1..24: mol_type = other DNA
gtatatgcctggaaccggaagaga

SEQ ID NO: 1257 - DNA, 24 bp, synthetic construct
  source 1..24: mol_type = other DNA
tatgcctggaaccggaagagaata

SEQ ID NO: 1258 - DNA, 24 bp, synthetic construct
  source 1..24: mol_type = other DNA
gcctggaaccggaagagaataagc

SEQ ID NO: 1259 - DNA, 24 bp, synthetic construct
  source 1..24: mol_type = other DNA
tggaaccggaagagaataagcaac

SEQ ID NO: 1260 - DNA, 24 bp, synthetic construct
  source 1..24: mol_type = other DNA
aaccggaagagaataagcaactgt

SEQ ID NO: 1261 - DNA, 24 bp, synthetic construct
  source 1..24: mol_type = other DNA
cggaagagaataagcaactgtgtt

SEQ ID NO: 1262 - DNA, 24 bp, synthetic construct
  source 1..24: mol_type = other DNA
aagagaataagcaactgtgttgca

SEQ ID NO: 1263 - DNA, 24 bp, synthetic construct
  source 1..24: mol_type = other DNA
agaataagcaactgtgttgcagac

SEQ ID NO: 1264 - DNA, 24 bp, synthetic construct
  source 1..24: mol_type = other DNA
ataagcaactgtgttgcagactat

SEQ ID NO: 1265 - DNA, 24 bp, synthetic construct
  source 1..24: mol_type = other DNA
agcaactgtgttgcagactatagc

SEQ ID NO: 1266 - DNA, 24 bp, synthetic construct
  source 1..24: mol_type = other DNA
aactgtgttgcagactatagcgtg

SEQ ID NO: 1267 - DNA, 24 bp, synthetic construct
  source 1..24: mol_type = other DNA
tgtgttgcagactatagcgtgctt

SEQ ID NO: 1268 - DNA, 24 bp, synthetic construct
  source 1..24: mol_type = other DNA
gttgcagactatagcgtgctttac

SEQ ID NO: 1269 - DNA, 24 bp, synthetic construct
  source 1..24: mol_type = other DNA
gcagactatagcgtgctttacaat

SEQ ID NO: 1270 - DNA, 24 bp, synthetic construct
  source 1..24: mol_type = other DNA
gactatagcgtgctttacaattcc

SEQ ID NO: 1271 - DNA, 24 bp, synthetic construct
  source 1..24: mol_type = other DNA
tatagcgtgctttacaattccgca

SEQ ID NO: 1272 - DNA, 24 bp, synthetic construct
  source 1..24: mol_type = other DNA
agcgtgctttacaattccgcatcc

SEQ ID NO: 1273 - DNA, 24 bp, synthetic construct
  source 1..24: mol_type = other DNA
atcactaatctttgccccttcgat

SEQ ID NO: 1274 - DNA, 24 bp, synthetic construct
  source 1..24: mol_type = other DNA
actaatctttgccccttcgatgaa

SEQ ID NO: 1275 - DNA, 24 bp, synthetic construct
  source 1..24: mol_type = other DNA
aatctttgccccttcgatgaagta

SEQ ID NO: 1276 - DNA, 24 bp, synthetic construct
  source 1..24: mol_type = other DNA
ctttgccccttcgatgaagtattt

SEQ ID NO: 1277 - DNA, 24 bp, synthetic construct
  source 1..24: mol_type = other DNA
tgccccttcgatgaagtatttaac

SEQ ID NO: 1278 - DNA, 24 bp, synthetic construct
  source 1..24: mol_type = other DNA
cccttcgatgaagtatttaacgct

SEQ ID NO: 1279 - DNA, 24 bp, synthetic construct
  source 1..24: mol_type = other DNA
ttcgatgaagtatttaacgctact

SEQ ID NO: 1280 - DNA, 24 bp, synthetic construct
  source 1..24: mol_type = other DNA
gatgaagtatttaacgctactcga

SEQ ID NO: 1281 - DNA, 24 bp, synthetic construct
  source 1..24: mol_type = other DNA
gatgaagtatttaacgctactaaa

SEQ ID NO: 1282 - DNA, 24 bp, synthetic construct
  source 1..24: mol_type = other DNA
ggggaagtatttaacgctactaaa

SEQ ID NO: 1283 - DNA, 24 bp, synthetic construct
  source 1..24: mol_type = other DNA
gaagtatttaacgctactaaattt

SEQ ID NO: 1284 - DNA, 24 bp, synthetic construct
  source 1..24: mol_type = other DNA
gtatttaacgctactaaatttgct

SEQ ID NO: 1285 - DNA, 24 bp, synthetic construct
  source 1..24: mol_type = other DNA
tttaacgctactaaatttgctagc

SEQ ID NO: 1286 - DNA, 24 bp, synthetic construct
  source 1..24: mol_type = other DNA
aacgctactaaatttgctagcgta

SEQ ID NO: 1287 - DNA, 24 bp, synthetic construct
  source 1..24: mol_type = other DNA
gctactaaatttgctagcgtatat

SEQ ID NO: 1288 - DNA, 24 bp, synthetic construct
  source 1..24: mol_type = other DNA
actaaatttgctagcgtatatgcc

SEQ ID NO: 1289 - DNA, 24 bp, synthetic construct
  source 1..24: mol_type = other DNA
aaatttgctagcgtatatgcctgg

SEQ ID NO: 1290 - DNA, 24 bp, synthetic construct
  source 1..24: mol_type = other DNA
cccttccagcaattcgggagagat

SEQ ID NO: 1291 - DNA, 24 bp, synthetic construct
  source 1..24: mol_type = other DNA
cttcccttccagcaattcgggaga

SEQ ID NO: 1292 - DNA, 24 bp, synthetic construct
  source 1..24: mol_type = other DNA
ttccttcccttccagcaattcggg

SEQ ID NO: 1293 - DNA, 24 bp, synthetic construct
  source 1..24: mol_type = other DNA
aaattccttcccttccagcaattc

SEQ ID NO: 1294 - DNA, 24 bp, synthetic construct
  source 1..24: mol_type = other DNA
aaaaaattccttcccttccagcaa

SEQ ID NO: 1295 - DNA, 24 bp, synthetic construct
  source 1..24: mol_type = other DNA
aacaaaaaattccttcccttccag

SEQ ID NO: 1296 - DNA, 24 bp, synthetic construct
  source 1..24: mol_type = other DNA
tctaacaaaaaattccttcccttc

SEQ ID NO: 1297 - DNA, 24 bp, synthetic construct
  source 1..24: mol_type = other DNA
gaatctaacaaaaaattccttccc

SEQ ID NO: 1298 - DNA, 24 bp, synthetic construct
  source 1..24: mol_type = other DNA
acagaatctaacaaaaaattcctt

SEQ ID NO: 1299 - DNA, 24 bp, synthetic construct
  source 1..24: mol_type = other DNA
ttgacagaatctaacaaaaaattc

SEQ ID NO: 1300 - DNA, 24 bp, synthetic construct
  source 1..24: mol_type = other DNA
gttttgacagaatctaacaaaaaa

SEQ ID NO: 1301 - DNA, 24 bp, synthetic construct
  source 1..24: mol_type = other DNA
ggtgttttgacagaatctaacaaa

SEQ ID NO: 1302 - DNA, 24 bp, synthetic construct
  source 1..24: mol_type = other DNA
acaggtgttttgacagaatctaac

SEQ ID NO: 1303 - DNA, 24 bp, synthetic construct
  source 1..24: mol_type = other DNA
ggaacaggtgttttgacagaatct

SEQ ID NO: 1304 - DNA, 24 bp, synthetic construct
  source 1..24: mol_type = other DNA
accggaacaggtgttttgacagaa

SEQ ID NO: 1305 - DNA, 24 bp, synthetic construct
  source 1..24: mol_type = other DNA
ctcaccggaacaggtgttttgaca

SEQ ID NO: 1306 - DNA, 24 bp, synthetic construct
  source 1..24: mol_type = other DNA
ggcctcaccggaacaggtgttttg

SEQ ID NO: 1307 - DNA, 24 bp, synthetic construct
  source 1..24: mol_type = other DNA
aatggcctcaccggaacaggtgtt

SEQ ID NO: 1308 - DNA, 24 bp, synthetic construct
  source 1..24: mol_type = other DNA
ttcaatggcctcaccggaacaggt

SEQ ID NO: 1309 - DNA, 24 bp, synthetic construct
  source 1..24: mol_type = other DNA
aatttcaatggcctcaccggaaca

SEQ ID NO: 1310 - DNA, 24 bp, synthetic construct
  source 1..24: mol_type = other DNA
ttcaatttcaatggcctcaccgga

SEQ ID NO: 1311 - DNA, 24 bp, synthetic construct
  source 1..24: mol_type = other DNA
aacttcaatttcaatggcctcacc

SEQ ID NO: 1312 - DNA, 24 bp, synthetic construct
  source 1..24: mol_type = other DNA
gtgaacttcaatttcaatggcctc

SEQ ID NO: 1313 - DNA, 24 bp, synthetic construct
  source 1..24: mol_type = other DNA
tgcgtgaacttcaatttcaatggc

SEQ ID NO: 1314 - DNA, 24 bp, synthetic construct
  source 1..24: mol_type = other DNA
aaatgcgtgaacttcaatttcaat

SEQ ID NO: 1315 - DNA, 24 bp, synthetic construct
  source 1..24: mol_type = other DNA
aacaaatgcgtgaacttcaatttc

SEQ ID NO: 1316 - DNA, 24 bp, synthetic construct
  source 1..24: mol_type = other DNA
aaaaacaaatgcgtgaacttcaat

SEQ ID NO: 1317 - DNA, 24 bp, synthetic construct
  source 1..24: mol_type = other DNA
gtaaaaaacaaatgcgtgaacttc

SEQ ID NO: 1318 - DNA, 24 bp, synthetic construct
  source 1..24: mol_type = other DNA
cttgtaaaaaacaaatgcgtgaac

SEQ ID NO: 1319 - DNA, 24 bp, synthetic construct
  source 1..24: mol_type = other DNA
aatcttgtaaaaaacaaatgcgtg

SEQ ID NO: 1320 - DNA, 24 bp, synthetic construct
  source 1..24: mol_type = other DNA
actaatcttgtaaaaaacaaatgc

SEQ ID NO: 1321 - DNA, 24 bp, synthetic construct
  source 1..24: mol_type = other DNA
tccactaatcttgtaaaaaacaaa

SEQ ID NO: 1322 - DNA, 24 bp, synthetic construct
  source 1..24: mol_type = other DNA
aagtccactaatcttgtaaaaaac

SEQ ID NO: 1323 - DNA, 24 bp, synthetic construct
  source 1..24: mol_type = other DNA
aaaaagtccactaatcttgtaaaa

SEQ ID NO: 1324 - DNA, 24 bp, synthetic construct
  source 1..24: mol_type = other DNA
ccaaaaaagtccactaatcttgta

SEQ ID NO: 1325 - DNA, 24 bp, synthetic construct
  source 1..24: mol_type = other DNA
ggtccaaaaaagtccactaatctt

SEQ ID NO: 1326 - DNA, 24 bp, synthetic construct
  source 1..24: mol_type = other DNA
tgtggtccaaaaaagtccactaat

SEQ ID NO: 1327 - DNA, 24 bp, synthetic construct
  source 1..24: mol_type = other DNA
gtctgtggtccaaaaaagtccact

SEQ ID NO: 1328 - DNA, 24 bp, synthetic construct
  source 1..24: mol_type = other DNA
actgtctgtggtccaaaaaagtcc

SEQ ID NO: 1329 - DNA, 24 bp, synthetic construct
  source 1..24: mol_type = other DNA
aaaggaacaggtgttttgacagaa

SEQ ID NO: 1330 - DNA, 24 bp, synthetic construct
  source 1..24: mol_type = other DNA
ctcaaaggaacaggtgttttgaca

SEQ ID NO: 1331 - DNA, 24 bp, synthetic construct
  source 1..24: mol_type = other DNA
ggcctcaaaggaacaggtgttttg

SEQ ID NO: 1332 - DNA, 24 bp, synthetic construct
  source 1..24: mol_type = other DNA
aatggcctcaaaggaacaggtgtt

SEQ ID NO: 1333 - DNA, 24 bp, synthetic construct
  source 1..24: mol_type = other DNA
ttcaatggcctcaaaggaacaggt

SEQ ID NO: 1334 - DNA, 24 bp, synthetic construct
  source 1..24: mol_type = other DNA
aatttcaatggcctcaaaggaaca

SEQ ID NO: 1335 - DNA, 24 bp, synthetic construct
  source 1..24: mol_type = other DNA
ttcaatttcaatggcctcaaagga

SEQ ID NO: 1336 - DNA, 24 bp, synthetic construct
  source 1..24: mol_type = other DNA
aacttcaatttcaatggcctcaaa

SEQ ID NO: 1337 - protein, 10 aa, synthetic construct
RVQPTESIVR

SEQ ID NO: 1338 - protein, 10 aa, synthetic construct
VQPTESIVRF

SEQ ID NO: 1339 - protein, 10 aa, synthetic construct
QPTESIVRFP

SEQ ID NO: 1340 - protein, 10 aa, synthetic construct
PTESIVRFPN

SEQ ID NO: 1341 - protein, 10 aa, synthetic construct
TESIVRFPNI

SEQ ID NO: 1342 - protein, 10 aa, synthetic construct
ESIVRFPNIT

SEQ ID NO: 1343 - protein, 10 aa, synthetic construct
SIVRFPNITN

SEQ ID NO: 1344 - protein, 10 aa, synthetic construct
IVRFPNITNL

SEQ ID NO: 1345 - protein, 10 aa, synthetic construct
VRFPNITNLC

SEQ ID NO: 1346 - protein, 10 aa, synthetic construct
RFPNITNLCP

SEQ ID NO: 1347 - protein, 10 aa, synthetic construct
FPNITNLCPF

SEQ ID NO: 1348 - protein, 10 aa, synthetic construct
PNITNLCPFG

SEQ ID NO: 1349 - protein, 10 aa, synthetic construct
NITNLCPFGE

SEQ ID NO: 1350 - protein, 10 aa, synthetic construct
ITNLCPFGEV

SEQ ID NO: 1351 - protein, 10 aa, synthetic construct
TNLCPFGEVF

SEQ ID NO: 1352 - protein, 10 aa, synthetic construct
NLCPFGEVFN

SEQ ID NO: 1353 - protein, 10 aa, synthetic construct
LCPFGEVFNA

SEQ ID NO: 1354 - protein, 10 aa, synthetic construct
CPFGEVFNAT

SEQ ID NO: 1355 - protein, 10 aa, synthetic construct
PFGEVFNATR

SEQ ID NO: 1356 - protein, 10 aa, synthetic construct
FGEVFNATRF

SEQ ID NO: 1357 - protein, 10 aa, synthetic construct
GEVFNATRFA

SEQ ID NO: 1358 - protein, 10 aa, synthetic construct
EVFNATRFAS

SEQ ID NO: 1359 - protein, 10 aa, synthetic construct
VFNATRFASV

SEQ ID NO: 1360 - protein, 10 aa, synthetic construct
FNATRFASVY

SEQ ID NO: 1361 - protein, 10 aa, synthetic construct
NATRFASVYA

SEQ ID NO: 1362 - protein, 10 aa, synthetic construct
ATRFASVYAW

SEQ ID NO: 1363 - protein, 10 aa, synthetic construct
TRFASVYAWN

SEQ ID NO: 1364 - protein, 10 aa, synthetic construct
RFASVYAWNR

SEQ ID NO: 1365 - protein, 10 aa, synthetic construct
FASVYAWNRK

SEQ ID NO: 1366 - protein, 10 aa, synthetic construct
ASVYAWNRKR

SEQ ID NO: 1367 - protein, 10 aa, synthetic construct
SVYAWNRKRI

SEQ ID NO: 1368 - protein, 10 aa, synthetic construct
VYAWNRKRIS

SEQ ID NO: 1369 - protein, 10 aa, synthetic construct
YAWNRKRISN

SEQ ID NO: 1370 - protein, 10 aa, synthetic construct
AWNRKRISNC

SEQ ID NO: 1371 - protein, 10 aa, synthetic construct
WNRKRISNCV

SEQ ID NO: 1372 - protein, 10 aa, synthetic construct
NRKRISNCVA

SEQ ID NO: 1373 - protein, 10 aa, synthetic construct
RKRISNCVAD

SEQ ID NO: 1374 - protein, 10 aa, synthetic construct
KRISNCVADY

SEQ ID NO: 1375 - protein, 10 aa, synthetic construct
RISNCVADYS

SEQ ID NO: 1376 - protein, 10 aa, synthetic construct
ISNCVADYSV

SEQ ID NO: 1377 - protein, 10 aa, synthetic construct
SNCVADYSVL

SEQ ID NO: 1378 - protein, 10 aa, synthetic construct
NCVADYSVLY

SEQ ID NO: 1379 - protein, 10 aa, synthetic construct
CVADYSVLYN

SEQ ID NO: 1380 - protein, 10 aa, synthetic construct
VADYSVLYNS

SEQ ID NO: 1381 - protein, 10 aa, synthetic construct
ADYSVLYNSA

SEQ ID NO: 1382 - protein, 10 aa, synthetic construct
DYSVLYNSAS

SEQ ID NO: 1383 - protein, 10 aa, synthetic construct
YSVLYNSASF

SEQ ID NO: 1384 - protein, 10 aa, synthetic construct
SVLYNSASFS

SEQ ID NO: 1385 - protein, 10 aa, synthetic construct
PNITNLCPFD

SEQ ID NO: 1386 - protein, 10 aa, synthetic construct
NITNLCPFDE

SEQ ID NO: 1387 - protein, 10 aa, synthetic construct
ITNLCPFDEV

SEQ ID NO: 1388 - protein, 10 aa, synthetic construct
TNLCPFDEVF

SEQ ID NO: 1389 - protein, 10 aa, synthetic construct
NLCPFDEVFN

SEQ ID NO: 1390 - protein, 10 aa, synthetic construct
LCPFDEVFNA

SEQ ID NO: 1391 - protein, 10 aa, synthetic construct
CPFDEVFNAT

SEQ ID NO: 1392 - protein, 10 aa, synthetic construct
PFDEVFNATR

SEQ ID NO: 1393 - protein, 10 aa, synthetic construct
FDEVFNATRF

SEQ ID NO: 1394 - protein, 10 aa, synthetic construct
DEVFNATRFA

SEQ ID NO: 1395 - protein, 10 aa, synthetic construct
PFDEVFNATK

SEQ ID NO: 1396 - protein, 10 aa, synthetic construct
FDEVFNATKF

SEQ ID NO: 1397 - protein, 10 aa, synthetic construct
DEVFNATKFA

SEQ ID NO: 1398 - protein, 10 aa, synthetic construct
PFGEVFNATK

SEQ ID NO: 1399 - protein, 10 aa, synthetic construct
FGEVFNATKF

SEQ ID NO: 1400 - protein, 10 aa, synthetic construct
GEVFNATKFA

SEQ ID NO: 1401 - protein, 10 aa, synthetic construct
EVFNATKFAS

SEQ ID NO: 1402 - protein, 10 aa, synthetic construct
VFNATKFASV

SEQ ID NO: 1403 - protein, 10 aa, synthetic construct
FNATKFASVY

SEQ ID NO: 1404 - protein, 10 aa, synthetic construct
NATKFASVYA

SEQ ID NO: 1405 - protein, 10 aa, synthetic construct
ATKFASVYAW

SEQ ID NO: 1406 - protein, 10 aa, synthetic construct
TKFASVYAWN

SEQ ID NO: 1407 - protein, 10 aa, synthetic construct
KFASVYAWNR

SEQ ID NO: 1408 - protein, 10 aa, synthetic construct
FLPFQQFGRD

SEQ ID NO: 1409 - protein, 10 aa, synthetic construct
KFLPFQQFGR

SEQ ID NO: 1410 - protein, 10 aa, synthetic construct
KKFLPFQQFG

SEQ ID NO: 1411 - protein, 10 aa, synthetic construct
NKKFLPFQQF

SEQ ID NO: 1412 - protein, 10 aa, synthetic construct
SNKKFLPFQQ

SEQ ID NO: 1413 - protein, 10 aa, synthetic construct
ESNKKFLPFQ

SEQ ID NO: 1414 - protein, 10 aa, synthetic construct
TESNKKFLPF

SEQ ID NO: 1415 - protein, 10 aa, synthetic construct
LTESNKKFLP

SEQ ID NO: 1416 - protein, 10 aa, synthetic construct
VLTESNKKFL

SEQ ID NO: 1417 - protein, 10 aa, synthetic construct
GVLTESNKKF

SEQ ID NO: 1418 - protein, 10 aa, synthetic construct
TGVLTESNKK

SEQ ID NO: 1419 - protein, 10 aa, synthetic construct
GTGVLTESNK

SEQ ID NO: 1420 - protein, 10 aa, synthetic construct
TGTGVLTESN

SEQ ID NO: 1421 - protein, 10 aa, synthetic construct
LTGTGVLTES

SEQ ID NO: 1422 - protein, 10 aa, synthetic construct
GLTGTGVLTE

SEQ ID NO: 1423 - protein, 10 aa, synthetic construct
NGLTGTGVLT

SEQ ID NO: 1424 - protein, 10 aa, synthetic construct
FNGLTGTGVL

SEQ ID NO: 1425 - protein, 10 aa, synthetic construct
NFNGLTGTGV

SEQ ID NO: 1426 - protein, 10 aa, synthetic construct
FNFNGLTGTG

SEQ ID NO: 1427 - protein, 10 aa, synthetic construct
NFNFNGLTGT

SEQ ID NO: 1428 - protein, 10 aa, synthetic construct
VNFNFNGLTG

SEQ ID NO: 1429 - protein, 10 aa, synthetic construct
CVNFNFNGLT

SEQ ID NO: 1430 - protein, 10 aa, synthetic construct
KCVNFNFNGL

SEQ ID NO: 1431 - protein, 10 aa, synthetic construct
NKCVNFNFNG

SEQ ID NO: 1432 - protein, 10 aa, synthetic construct
KNKCVNFNFN

SEQ ID NO: 1433 - protein, 10 aa, synthetic construct
VKNKCVNFNF

SEQ ID NO: 1434 - protein, 10 aa, synthetic construct
LVKNKCVNFN

SEQ ID NO: 1435 - protein, 10 aa, synthetic construct
NLVKNKCVNF

SEQ ID NO: 1436 - protein, 10 aa, synthetic construct
TNLVKNKCVN

SEQ ID NO: 1437 - protein, 10 aa, synthetic construct
STNLVKNKCV

SEQ ID NO: 1438 - protein, 10 aa, synthetic construct
KSTNLVKNKC

SEQ ID NO: 1439 - protein, 10 aa, synthetic construct
KKSTNLVKNK

SEQ ID NO: 1440 - protein, 10 aa, synthetic construct
PKKSTNLVKN

SEQ ID NO: 1441 - protein, 10 aa, synthetic construct
GPKKSTNLVK

SEQ ID NO: 1442 - protein, 10 aa, synthetic construct
CGPKKSTNLV

SEQ ID NO: 1443 - protein, 10 aa, synthetic construct
VCGPKKSTNL

SEQ ID NO: 1444 - protein, 10 aa, synthetic construct
TVCGPKKSTN

SEQ ID NO: 1445 - protein, 10 aa, synthetic construct
ATVCGPKKST

SEQ ID NO: 1446 - protein, 10 aa, synthetic construct
PATVCGPKKS

SEQ ID NO: 1447 - protein, 10 aa, synthetic construct
KGTGVLTESN

SEQ ID NO: 1448 - protein, 10 aa, synthetic construct
LKGTGVLTES

SEQ ID NO: 1449 - protein, 10 aa, synthetic construct
GLKGTGVLTE

SEQ ID NO: 1450 - protein, 10 aa, synthetic construct
NGLKGTGVLT

SEQ ID NO: 1451 - protein, 10 aa, synthetic construct
FNGLKGTGVL

SEQ ID NO: 1452 - protein, 10 aa, synthetic construct
NFNGLKGTGV

SEQ ID NO: 1453 - protein, 10 aa, synthetic construct
FNFNGLKGTG

SEQ ID NO: 1454 - protein, 10 aa, synthetic construct
NFNFNGLKGT

SEQ ID NO: 1455 - protein, 10 aa, synthetic construct
VNFNFNGLKG

SEQ ID NO: 1456 - protein, 10 aa, synthetic construct
CVNFNFNGLK

SEQ ID NO: 1457 - DNA, 30 bp, synthetic construct
  source 1..30: mol_type = other DNA
agggttcagcccaccgaatcaatagtacgg

SEQ ID NO: 1458 - DNA, 30 bp, synthetic construct
  source 1..30: mol_type = other DNA
gttcagcccaccgaatcaatagtacggttc

SEQ ID NO: 1459 - DNA, 30 bp, synthetic construct
  source 1..30: mol_type = other DNA
cagcccaccgaatcaatagtacggttccca

SEQ ID NO: 1460 - DNA, 30 bp, synthetic construct
  source 1..30: mol_type = other DNA
cccaccgaatcaatagtacggttcccaaat

SEQ ID NO: 1461 - DNA, 30 bp, synthetic construct
  source 1..30: mol_type = other DNA
accgaatcaatagtacggttcccaaatatc

SEQ ID NO: 1462 - DNA, 30 bp, synthetic construct
  source 1..30: mol_type = other DNA
gaatcaatagtacggttcccaaatatcact

SEQ ID NO: 1463 - DNA, 30 bp, synthetic construct
  source 1..30: mol_type = other DNA
tcaatagtacggttcccaaatatcactaat

SEQ ID NO: 1464 - DNA, 30 bp, synthetic construct
  source 1..30: mol_type = other DNA
atagtacggttcccaaatatcactaatctt

SEQ ID NO: 1465 - DNA, 30 bp, synthetic construct
  source 1..30: mol_type = other DNA
gtacggttcccaaatatcactaatctttgc

SEQ ID NO: 1466 - DNA, 30 bp, synthetic construct
  source 1..30: mol_type = other DNA
cggttcccaaatatcactaatctttgcccc

SEQ ID NO: 1467 - DNA, 30 bp, synthetic construct
  source 1..30: mol_type = other DNA
ttcccaaatatcactaatctttgccccttc

SEQ ID NO: 1468 - DNA, 30 bp, synthetic construct
  source 1..30: mol_type = other DNA
ccaaatatcactaatctttgccccttcggg

SEQ ID NO: 1469 - DNA, 30 bp, synthetic construct
  source 1..30: mol_type = other DNA
aatatcactaatctttgccccttcggggaa

SEQ ID NO: 1470 - DNA, 30 bp, synthetic construct
  source 1..30: mol_type = other DNA
atcactaatctttgccccttcggggaagta

SEQ ID NO: 1471 - DNA, 30 bp, synthetic construct
  source 1..30: mol_type = other DNA
actaatctttgccccttcggggaagtattt

SEQ ID NO: 1472 - DNA, 30 bp, synthetic construct
  source 1..30: mol_type = other DNA
aatctttgccccttcggggaagtatttaac

SEQ ID NO: 1473 - DNA, 30 bp, synthetic construct
  source 1..30: mol_type = other DNA
ctttgccccttcggggaagtatttaacgct

SEQ ID NO: 1474 - DNA, 30 bp, synthetic construct
  source 1..30: mol_type = other DNA
tgccccttcggggaagtatttaacgctact

SEQ ID NO: 1475 - DNA, 30 bp, synthetic construct
  source 1..30: mol_type = other DNA
cccttcggggaagtatttaacgctactcga

SEQ ID NO: 1476 - DNA, 30 bp, synthetic construct
  source 1..30: mol_type = other DNA
ttcggggaagtatttaacgctactcgattt

SEQ ID NO: 1477 - DNA, 30 bp, synthetic construct
  source 1..30: mol_type = other DNA
ggggaagtatttaacgctactcgatttgct

SEQ ID NO: 1478 - DNA, 30 bp, synthetic construct
  source 1..30: mol_type = other DNA
gaagtatttaacgctactcgatttgctagc

SEQ ID NO: 1479 - DNA, 30 bp, synthetic construct
  source 1..30: mol_type = other DNA
gtatttaacgctactcgatttgctagcgta

SEQ ID NO: 1480 - DNA, 30 bp, synthetic construct
  source 1..30: mol_type = other DNA
tttaacgctactcgatttgctagcgtatat

SEQ ID NO: 1481 - DNA, 30 bp, synthetic construct
  source 1..30: mol_type = other DNA
aacgctactcgatttgctagcgtatatgcc

SEQ ID NO: 1482 - DNA, 30 bp, synthetic construct
  source 1..30: mol_type = other DNA
gctactcgatttgctagcgtatatgcctgg

SEQ ID NO: 1483 - DNA, 30 bp, synthetic construct
  source 1..30: mol_type = other DNA
actcgatttgctagcgtatatgcctggaac

SEQ ID NO: 1484 - DNA, 30 bp, synthetic construct
  source 1..30: mol_type = other DNA
cgatttgctagcgtatatgcctggaaccgg

SEQ ID NO: 1485 - DNA, 30 bp, synthetic construct
  source 1..30: mol_type = other DNA
tttgctagcgtatatgcctggaaccggaag

SEQ ID NO: 1486 - DNA, 30 bp, synthetic construct
  source 1..30: mol_type = other DNA
gctagcgtatatgcctggaaccggaagaga

SEQ ID NO: 1487 - DNA, 30 bp, synthetic construct
  source 1..30: mol_type = other DNA
agcgtatatgcctggaaccggaagagaata

SEQ ID NO: 1488 - DNA, 30 bp, synthetic construct
  source 1..30: mol_type = other DNA
gtatatgcctggaaccggaagagaataagc

SEQ ID NO: 1489 - DNA, 30 bp, synthetic construct
  source 1..30: mol_type = other DNA
tatgcctggaaccggaagagaataagcaac

SEQ ID NO: 1490 - DNA, 30 bp, synthetic construct
  source 1..30: mol_type = other DNA
gcctggaaccggaagagaataagcaactgt

SEQ ID NO: 1491 - DNA, 30 bp, synthetic construct
  source 1..30: mol_type = other DNA
tggaaccggaagagaataagcaactgtgtt

SEQ ID NO: 1492 - DNA, 30 bp, synthetic construct
  source 1..30: mol_type = other DNA
aaccggaagagaataagcaactgtgttgca

SEQ ID NO: 1493 - DNA, 30 bp, synthetic construct
  source 1..30: mol_type = other DNA
cggaagagaataagcaactgtgttgcagac

SEQ ID NO: 1494 - DNA, 30 bp, synthetic construct
  source 1..30: mol_type = other DNA
aagagaataagcaactgtgttgcagactat

SEQ ID NO: 1495 - DNA, 30 bp, synthetic construct; identical to SEQ ID NO: 462
  source 1..30: mol_type = other DNA

SEQ ID NO: 1496 - DNA, 30 bp, synthetic construct
  source 1..30: mol_type = other DNA
ataagcaactgtgttgcagactatagcgtg

SEQ ID NO: 1497 - DNA, 30 bp, synthetic construct
  source 1..30: mol_type = other DNA
agcaactgtgttgcagactatagcgtgctt

SEQ ID NO: 1498 - DNA, 30 bp, synthetic construct
  source 1..30: mol_type = other DNA
aactgtgttgcagactatagcgtgctttac

SEQ ID NO: 1499 - DNA, 30 bp, synthetic construct
  source 1..30: mol_type = other DNA
tgtgttgcagactatagcgtgctttacaat

SEQ ID NO: 1500 - DNA, 30 bp, synthetic construct
  source 1..30: mol_type = other DNA
gttgcagactatagcgtgctttacaattcc

SEQ ID NO: 1501 - DNA, 30 bp, synthetic construct
  source 1..30: mol_type = other DNA
gcagactatagcgtgctttacaattccgca

SEQ ID NO: 1502 - DNA, 30 bp, synthetic construct
  source 1..30: mol_type = other DNA
gactatagcgtgctttacaattccgcatcc

SEQ ID NO: 1503 - DNA, 30 bp, synthetic construct
  source 1..30: mol_type = other DNA
tatagcgtgctttacaattccgcatccttt

SEQ ID NO: 1504 - DNA, 30 bp, synthetic construct
  source 1..30: mol_type = other DNA
agcgtgctttacaattccgcatcctttagt

SEQ ID NO: 1505 - DNA, 30 bp, synthetic construct
  source 1..30: mol_type = other DNA
ccaaatatcactaatctttgccccttcgat

SEQ ID NO: 1506 - DNA, 30 bp, synthetic construct
  source 1..30: mol_type = other DNA
aatatcactaatctttgccccttcgatgaa

SEQ ID NO: 1507 - DNA, 30 bp, synthetic construct
  source 1..30: mol_type = other DNA
atcactaatctttgccccttcgatgaagta

SEQ ID NO: 1508 - DNA, 30 bp, synthetic construct
  source 1..30: mol_type = other DNA
actaatctttgccccttcgatgaagtattt

SEQ ID NO: 1509 - DNA, 30 bp, synthetic construct
  source 1..30: mol_type = other DNA
aatctttgccccttcgatgaagtatttaac

SEQ ID NO: 1510 - DNA, 30 bp, synthetic construct
  source 1..30: mol_type = other DNA
ctttgccccttcgatgaagtatttaacgct

SEQ ID NO: 1511 - DNA, 30 bp, synthetic construct
  source 1..30: mol_type = other DNA
tgccccttcgatgaagtatttaacgctact

SEQ ID NO: 1512 - DNA, 30 bp, synthetic construct
  source 1..30: mol_type = other DNA
cccttcgatgaagtatttaacgctactcga

SEQ ID NO: 1513 - DNA, 30 bp, synthetic construct
  source 1..30: mol_type = other DNA
ttcgatgaagtatttaacgctactcgattt

SEQ ID NO: 1514 - DNA, 30 bp, synthetic construct
  source 1..30: mol_type = other DNA
gatgaagtatttaacgctactcgatttgct

SEQ ID NO: 1515 - DNA, 30 bp, synthetic construct
  source 1..30: mol_type = other DNA
cccttcgatgaagtatttaacgctactaaa

SEQ ID NO: 1516 - DNA, 30 bp, synthetic construct
  source 1..30: mol_type = other DNA
ttcgatgaagtatttaacgctactaaattt

SEQ ID NO: 1517 - DNA, 30 bp, synthetic construct
  source 1..30: mol_type = other DNA
gatgaagtatttaacgctactaaatttgct

SEQ ID NO: 1518 - DNA, 30 bp, synthetic construct
  source 1..30: mol_type = other DNA
cccttcggggaagtatttaacgctactaaa

SEQ ID NO: 1519 - DNA, 30 bp, synthetic construct
  source 1..30: mol_type = other DNA
ttcggggaagtatttaacgctactaaattt

SEQ ID NO: 1520 - DNA, 30 bp, synthetic construct
  source 1..30: mol_type = other DNA
ggggaagtatttaacgctactaaatttgct

SEQ ID NO: 1521 - DNA, 30 bp, synthetic construct
  source 1..30: mol_type = other DNA
gaagtatttaacgctactaaatttgctagc

SEQ ID NO: 1522 - DNA, 30 bp, synthetic construct
  source 1..30: mol_type = other DNA
gtatttaacgctactaaatttgctagcgta

SEQ ID NO: 1523 - DNA, 30 bp, synthetic construct
  source 1..30: mol_type = other DNA
tttaacgctactaaatttgctagcgtatat

SEQ ID NO: 1524 - DNA, 30 bp, synthetic construct
  source 1..30: mol_type = other DNA
aacgctactaaatttgctagcgtatatgcc

SEQ ID NO: 1525 - DNA, 30 bp, synthetic construct
  source 1..30: mol_type = other DNA
gctactaaatttgctagcgtatatgcctgg

SEQ ID NO: 1526 - DNA, 30 bp, synthetic construct
  source 1..30: mol_type = other DNA
actaaatttgctagcgtatatgcctggaac

SEQ ID NO: 1527 - DNA, 30 bp, synthetic construct
  source 1..30: mol_type = other DNA
aaatttgctagcgtatatgcctggaaccgg

SEQ ID NO: 1528 - DNA, 30 bp, synthetic construct
  source 1..30: mol_type = other DNA
ttccttcccttccagcaattcgggagagat

SEQ ID NO: 1529 - DNA, 30 bp, synthetic construct
  source 1..30: mol_type = other DNA
aaattccttcccttccagcaattcgggaga

SEQ ID NO: 1530 - DNA, 30 bp, synthetic construct
  source 1..30: mol_type = other DNA
aaaaaattccttcccttccagcaattcggg

SEQ ID NO: 1531 - DNA, 30 bp, synthetic construct
  source 1..30: mol_type = other DNA
aacaaaaaattccttcccttccagcaattc

SEQ ID NO: 1532 - DNA, 30 bp, synthetic construct
  source 1..30: mol_type = other DNA
tctaacaaaaaattccttcccttccagcaa

SEQ ID NO: 1533 - DNA, 30 bp, synthetic construct
  source 1..30: mol_type = other DNA
gaatctaacaaaaaattccttcccttccag

SEQ ID NO: 1534 - DNA, 30 bp, synthetic construct
  source 1..30: mol_type = other DNA
acagaatctaacaaaaaattccttcccttc

SEQ ID NO: 1535 - DNA, 30 bp, synthetic construct
  source 1..30: mol_type = other DNA
ttgacagaatctaacaaaaaattccttccc

SEQ ID NO: 1536 - DNA, 30 bp, synthetic construct
  source 1..30: mol_type = other DNA
gttttgacagaatctaacaaaaaattcctt

SEQ ID NO: 1537 - DNA, 30 bp, synthetic construct
  source 1..30: mol_type = other DNA
ggtgttttgacagaatctaacaaaaaattc

SEQ ID NO: 1538 - DNA, 30 bp, synthetic construct
  source 1..30: mol_type = other DNA
acaggtgttttgacagaatctaacaaaaaa

SEQ ID NO: 1539 - DNA, 30 bp, synthetic construct
  source 1..30: mol_type = other DNA
ggaacaggtgttttgacagaatctaacaaa

SEQ ID NO: 1540 - DNA, 30 bp, synthetic construct
  source 1..30: mol_type = other DNA
accggaacaggtgttttgacagaatctaac

SEQ ID NO: 1541 - DNA, 30 bp, synthetic construct
  source 1..30: mol_type = other DNA
ctcaccggaacaggtgttttgacagaatct

SEQ ID NO: 1542 - DNA, 30 bp, synthetic construct
  source 1..30: mol_type = other DNA
ggcctcaccggaacaggtgttttgacagaa

SEQ ID NO: 1543 - DNA, 30 bp, synthetic construct
  source 1..30: mol_type = other DNA
aatggcctcaccggaacaggtgttttgaca

SEQ ID NO: 1544 - DNA, 30 bp, synthetic construct
  source 1..30: mol_type = other DNA
ttcaatggcctcaccggaacaggtgttttg

SEQ ID NO: 1545 - DNA, 30 bp, synthetic construct
  source 1..30: mol_type = other DNA
aatttcaatggcctcaccggaacaggtgtt

SEQ ID NO: 1546 - DNA, 30 bp, synthetic construct
  source 1..30: mol_type = other DNA
ttcaatttcaatggcctcaccggaacaggt

SEQ ID NO: 1547 - DNA, 30 bp, synthetic construct
  source 1..30: mol_type = other DNA
aacttcaatttcaatggcctcaccggaaca

SEQ ID NO: 1548 - DNA, 30 bp, synthetic construct
  source 1..30: mol_type = other DNA
gtgaacttcaatttcaatggcctcaccgga

SEQ ID NO: 1549 - DNA, 30 bp, synthetic construct
  source 1..30: mol_type = other DNA
tgcgtgaacttcaatttcaatggcctcacc

SEQ ID NO: 1550 - DNA, 30 bp, synthetic construct
  source 1..30: mol_type = other DNA
aaatgcgtgaacttcaatttcaatggcctc

SEQ ID NO: 1551 - DNA, 30 bp, synthetic construct
  source 1..30: mol_type = other DNA
aacaaatgcgtgaacttcaatttcaatggc

SEQ ID NO: 1552 - DNA, 30 bp, synthetic construct
  source 1..30: mol_type = other DNA
aaaaacaaatgcgtgaacttcaatttcaat

SEQ ID NO: 1553 - DNA, 30 bp, synthetic construct
  source 1..30: mol_type = other DNA
gtaaaaaacaaatgcgtgaacttcaatttc

SEQ ID NO: 1554 - DNA, 30 bp, synthetic construct
  source 1..30: mol_type = other DNA
cttgtaaaaaacaaatgcgtgaacttcaat

SEQ ID NO: 1555 - DNA, 30 bp, synthetic construct
  source 1..30: mol_type = other DNA
aatcttgtaaaaaacaaatgcgtgaacttc

SEQ ID NO: 1556 - DNA, 30 bp, synthetic construct
  source 1..30: mol_type = other DNA
actaatcttgtaaaaaacaaatgcgtgaac

SEQ ID NO: 1557 - DNA, 30 bp, synthetic construct; identical to SEQ ID NO: 571
  source 1..30: mol_type = other DNA

SEQ ID NO: 1558 - DNA, 30 bp, synthetic construct
  source 1..30: mol_type = other DNA
aagtccactaatcttgtaaaaaacaaatgc

SEQ ID NO: 1559 - DNA, 30 bp, synthetic construct
  source 1..30: mol_type = other DNA
aaaaagtccactaatcttgtaaaaaacaaa

SEQ ID NO: 1560 - DNA, 30 bp, synthetic construct
  source 1..30: mol_type = other DNA
ccaaaaaagtccactaatcttgtaaaaaac

SEQ ID NO: 1561 - DNA, 30 bp, synthetic construct
  source 1..30: mol_type = other DNA
ggtccaaaaaagtccactaatcttgtaaaa

SEQ ID NO: 1562 - DNA, 30 bp, synthetic construct
  source 1..30: mol_type = other DNA
tgtggtccaaaaaagtccactaatcttgta

SEQ ID NO: 1563 - DNA, 30 bp, synthetic construct
  source 1..30: mol_type = other DNA
gtctgtggtccaaaaaagtccactaatctt

SEQ ID NO: 1564 - DNA, 30 bp, synthetic construct
  source 1..30: mol_type = other DNA
actgtctgtggtccaaaaaagtccactaat

SEQ ID NO: 1565 - DNA, 30 bp, synthetic construct
  source 1..30: mol_type = other DNA
gctactgtctgtggtccaaaaaagtccact

SEQ ID NO: 1566 - DNA, 30 bp, synthetic construct
  source 1..30: mol_type = other DNA
cctgctactgtctgtggtccaaaaaagtcc

SEQ ID NO: 1567 - DNA, 30 bp, synthetic construct; identical to SEQ ID NO: 1540
  source 1..30: mol_type = other DNA

SEQ ID NO: 1568 - DNA, 30 bp, synthetic construct; identical to SEQ ID NO: 1541
  source 1..30: mol_type = other DNA

SEQ ID NO: 1569 - DNA, 30 bp, synthetic construct; identical to SEQ ID NO: 1542
  source 1..30: mol_type = other DNA

SEQ ID NO: 1570 - DNA, 30 bp, synthetic construct; identical to SEQ ID NO: 1543
  source 1..30: mol_type = other DNA

SEQ ID NO: 1571 - DNA, 30 bp, synthetic construct; identical to SEQ ID NO: 1544
  source 1..30: mol_type = other DNA

SEQ ID NO: 1572 - DNA, 30 bp, synthetic construct; identical to SEQ ID NO: 1545
  source 1..30: mol_type = other DNA

SEQ ID NO: 1573 - DNA, 30 bp, synthetic construct; identical to SEQ ID NO: 1546
  source 1..30: mol_type = other DNA

SEQ ID NO: 1574 - DNA, 30 bp, synthetic construct; identical to SEQ ID NO: 1547
  source 1..30: mol_type = other DNA

SEQ ID NO: 1575 - DNA, 30 bp, synthetic construct; identical to SEQ ID NO: 1548
  source 1..30: mol_type = other DNA

SEQ ID NO: 1576 - DNA, 30 bp, synthetic construct; identical to SEQ ID NO: 1549
  source 1..30: mol_type = other DNA

SEQ ID NO: 1577 - protein, 249 aa, synthetic construct
VQPTESIVRFPNITNLCPFGEVFNATRFASVYAWNRKRISNCVADYSVLYNSASFSTFKCYGVSPTKLNDLCFTNVYADSFVIRGDEVRQIAPGQTGKIADYNYKLPDDFTGCVIAWNSNNLDSKVGGNYNYLYRLFRKSNLKPFERDISTEIYQAGSTPCNGVEGFNCYFPLQSYGFQPTNGVGYQPYRVVVLSFELLHAPATVCGPKKSTNLVKNKCVNFNFNGLTGTGVLTESNKKFLPFQQFGRD

SEQ ID NO: 1578 - protein, 248 aa, synthetic construct
QPTESIVRFPNITNLCPFGEVFNATRFASVYAWNRKRISNCVADYSVLYNSASFSTFKCYGVSPTKLNDLCFTNVYADSFVIRGDEVRQIAPGQTGKIADYNYKLPDDFTGCVIAWNSNNLDSKVGGNYNYLYRLFRKSNLKPFERDISTEIYQAGSTPCNGVEGFNCYFPLQSYGFQPTNGVGYQPYRVVVLSFELLHAPATVCGPKKSTNLVKNKCVNFNFNGLTGTGVLTESNKKFLPFQQFGRD

SEQ ID NO: 1579 - protein, 247 aa, synthetic construct
PTESIVRFPNITNLCPFGEVFNATRFASVYAWNRKRISNCVADYSVLYNSASFSTFKCYGVSPTKLNDLCFTNVYADSFVIRGDEVRQIAPGQTGKIADYNYKLPDDFTGCVIAWNSNNLDSKVGGNYNYLYRLFRKSNLKPFERDISTEIYQAGSTPCNGVEGFNCYFPLQSYGFQPTNGVGYQPYRVVVLSFELLHAPATVCGPKKSTNLVKNKCVNFNFNGLTGTGVLTESNKKFLPFQQFGRD

SEQ ID NO: 1580 - protein, 246 aa, synthetic construct
TESIVRFPNITNLCPFGEVFNATRFASVYAWNRKRISNCVADYSVLYNSASFSTFKCYGVSPTKLNDLCFTNVYADSFVIRGDEVRQIAPGQTGKIADYNYKLPDDFTGCVIAWNSNNLDSKVGGNYNYLYRLFRKSNLKPFERDISTEIYQAGSTPCNGVEGFNCYFPLQSYGFQPTNGVGYQPYRVVVLSFELLHAPATVCGPKKSTNLVKNKCVNFNFNGLTGTGVLTESNKKFLPFQQFGRD

SEQ ID NO: 1581 - protein, 245 aa, synthetic construct
ESIVRFPNITNLCPFGEVFNATRFASVYAWNRKRISNCVADYSVLYNSASFSTFKCYGVSPTKLNDLCFTNVYADSFVIRGDEVRQIAPGQTGKIADYNYKLPDDFTGCVIAWNSNNLDSKVGGNYNYLYRLFRKSNLKPFERDISTEIYQAGSTPCNGVEGFNCYFPLQSYGFQPTNGVGYQPYRVVVLSFELLHAPATVCGPKKSTNLVKNKCVNFNFNGLTGTGVLTESNKKFLPFQQFGRD

SEQ ID NO: 1582 - protein, 244 aa, synthetic construct
SIVRFPNITNLCPFGEVFNATRFASVYAWNRKRISNCVADYSVLYNSASFSTFKCYGVSPTKLNDLCFTNVYADSFVIRGDEVRQIAPGQTGKIADYNYKLPDDFTGCVIAWNSNNLDSKVGGNYNYLYRLFRKSNLKPFERDISTEIYQAGSTPCNGVEGFNCYFPLQSYGFQPTNGVGYQPYRVVVLSFELLHAPATVCGPKKSTNLVKNKCVNFNFNGLTGTGVLTESNKKFLPFQQFGRD

SEQ ID NO: 1583 - protein, 243 aa, synthetic construct
IVRFPNITNLCPFGEVFNATRFASVYAWNRKRISNCVADYSVLYNSASFSTFKCYGVSPTKLNDLCFTNVYADSFVIRGDEVRQIAPGQTGKIADYNYKLPDDFTGCVIAWNSNNLDSKVGGNYNYLYRLFRKSNLKPFERDISTEIYQAGSTPCNGVEGFNCYFPLQSYGFQPTNGVGYQPYRVVVLSFELLHAPATVCGPKKSTNLVKNKCVNFNFNGLTGTGVLTESNKKFLPFQQFGRD

SEQ ID NO: 1584 - protein, 242 aa, synthetic construct
VRFPNITNLCPFGEVFNATRFASVYAWNRKRISNCVADYSVLYNSASFSTFKCYGVSPTKLNDLCFTNVYADSFVIRGDEVRQIAPGQTGKIADYNYKLPDDFTGCVIAWNSNNLDSKVGGNYNYLYRLFRKSNLKPFERDISTEIYQAGSTPCNGVEGFNCYFPLQSYGFQPTNGVGYQPYRVVVLSFELLHAPATVCGPKKSTNLVKNKCVNFNFNGLTGTGVLTESNKKFLPFQQFGRD

SEQ ID NO: 1585 - protein, 241 aa, synthetic construct
RFPNITNLCPFGEVFNATRFASVYAWNRKRISNCVADYSVLYNSASFSTFKCYGVSPTKLNDLCFTNVYADSFVIRGDEVRQIAPGQTGKIADYNYKLPDDFTGCVIAWNSNNLDSKVGGNYNYLYRLFRKSNLKPFERDISTEIYQAGSTPCNGVEGFNCYFPLQSYGFQPTNGVGYQPYRVVVLSFELLHAPATVCGPKKSTNLVKNKCVNFNFNGLTGTGVLTESNKKFLPFQQFGRD

SEQ ID NO: 1586 - protein, 240 aa, synthetic construct
FPNITNLCPFGEVFNATRFASVYAWNRKRISNCVADYSVLYNSASFSTFKCYGVSPTKLNDLCFTNVYADSFVIRGDEVRQIAPGQTGKIADYNYKLPDDFTGCVIAWNSNNLDSKVGGNYNYLYRLFRKSNLKPFERDISTEIYQAGSTPCNGVEGFNCYFPLQSYGFQPTNGVGYQPYRVVVLSFELLHAPATVCGPKKSTNLVKNKCVNFNFNGLTGTGVLTESNKKFLPFQQFGRD

SEQ ID NO: 1587 - protein, 239 aa, synthetic construct
PNITNLCPFGEVFNATRFASVYAWNRKRISNCVADYSVLYNSASFSTFKCYGVSPTKLNDLCFTNVYADSFVIRGDEVRQIAPGQTGKIADYNYKLPDDFTGCVIAWNSNNLDSKVGGNYNYLYRLFRKSNLKPFERDISTEIYQAGSTPCNGVEGFNCYFPLQSYGFQPTNGVGYQPYRVVVLSFELLHAPATVCGPKKSTNLVKNKCVNFNFNGLTGTGVLTESNKKFLPFQQFGRD

SEQ ID NO: 1588 - protein, 238 aa, synthetic construct; identical to SEQ ID NO: 29

SEQ ID NO: 1589 - protein, 237 aa, synthetic construct
ITNLCPFGEVFNATRFASVYAWNRKRISNCVADYSVLYNSASFSTFKCYGVSPTKLNDLCFTNVYADSFVIRGDEVRQIAPGQTGKIADYNYKLPDDFTGCVIAWNSNNLDSKVGGNYNYLYRLFRKSNLKPFERDISTEIYQAGSTPCNGVEGFNCYFPLQSYGFQPTNGVGYQPYRVVVLSFELLHAPATVCGPKKSTNLVKNKCVNFNFNGLTGTGVLTESNKKFLPFQQFGRD

SEQ ID NO: 1590 - protein, 236 aa, synthetic construct
TNLCPFGEVFNATRFASVYAWNRKRISNCVADYSVLYNSASFSTFKCYGVSPTKLNDLCFTNVYADSFVIRGDEVRQIAPGQTGKIADYNYKLPDDFTGCVIAWNSNNLDSKVGGNYNYLYRLFRKSNLKPFERDISTEIYQAGSTPCNGVEGFNCYFPLQSYGFQPTNGVGYQPYRVVVLSFELLHAPATVCGPKKSTNLVKNKCVNFNFNGLTGTGVLTESNKKFLPFQQFGRD

SEQ ID NO: 1591 - protein, 235 aa, synthetic construct
NLCPFGEVFNATRFASVYAWNRKRISNCVADYSVLYNSASFSTFKCYGVSPTKLNDLCFTNVYADSFVIRGDEVRQIAPGQTGKIADYNYKLPDDFTGCVIAWNSNNLDSKVGGNYNYLYRLFRKSNLKPFERDISTEIYQAGSTPCNGVEGFNCYFPLQSYGFQPTNGVGYQPYRVVVLSFELLHAPATVCGPKKSTNLVKNKCVNFNFNGLTGTGVLTESNKKFLPFQQFGRD

SEQ ID NO: 1592 - protein, 234 aa, synthetic construct
LCPFGEVFNATRFASVYAWNRKRISNCVADYSVLYNSASFSTFKCYGVSPTKLNDLCFTNVYADSFVIRGDEVRQIAPGQTGKIADYNYKLPDDFTGCVIAWNSNNLDSKVGGNYNYLYRLFRKSNLKPFERDISTEIYQAGSTPCNGVEGFNCYFPLQSYGFQPTNGVGYQPYRVVVLSFELLHAPATVCGPKKSTNLVKNKCVNFNFNGLTGTGVLTESNKKFLPFQQFGRD

SEQ ID NO: 1593 - protein, 233 aa, synthetic construct
CPFGEVFNATRFASVYAWNRKRISNCVADYSVLYNSASFSTFKCYGVSPTKLNDLCFTNVYADSFVIRGDEVRQIAPGQTGKIADYNYKLPDDFTGCVIAWNSNNLDSKVGGNYNYLYRLFRKSNLKPFERDISTEIYQAGSTPCNGVEGFNCYFPLQSYGFQPTNGVGYQPYRVVVLSFELLHAPATVCGPKKSTNLVKNKCVNFNFNGLTGTGVLTESNKKFLPFQQFGRD

SEQ ID NO: 1594 - protein, 232 aa, synthetic construct
PFGEVFNATRFASVYAWNRKRISNCVADYSVLYNSASFSTFKCYGVSPTKLNDLCFTNVYADSFVIRGDEVRQIAPGQTGKIADYNYKLPDDFTGCVIAWNSNNLDSKVGGNYNYLYRLFRKSNLKPFERDISTEIYQAGSTPCNGVEGFNCYFPLQSYGFQPTNGVGYQPYRVVVLSFELLHAPATVCGPKKSTNLVKNKCVNFNFNGLTGTGVLTESNKKFLPFQQFGRD

SEQ ID NO: 1595 - protein, 231 aa, synthetic construct
FGEVFNATRFASVYAWNRKRISNCVADYSVLYNSASFSTFKCYGVSPTKLNDLCFTNVYADSFVIRGDEVRQIAPGQTGKIADYNYKLPDDFTGCVIAWNSNNLDSKVGGNYNYLYRLFRKSNLKPFERDISTEIYQAGSTPCNGVEGFNCYFPLQSYGFQPTNGVGYQPYRVVVLSFELLHAPATVCGPKKSTNLVKNKCVNFNFNGLTGTGVLTESNKKFLPFQQFGRD

SEQ ID NO: 1596 - protein, 230 aa, synthetic construct
GEVFNATRFASVYAWNRKRISNCVADYSVLYNSASFSTFKCYGVSPTKLNDLCFTNVYADSFVIRGDEVRQIAPGQTGKIADYNYKLPDDFTGCVIAWNSNNLDSKVGGNYNYLYRLFRKSNLKPFERDISTEIYQAGSTPCNGVEGFNCYFPLQSYGFQPTNGVGYQPYRVVVLSFELLHAPATVCGPKKSTNLVKNKCVNFNFNGLTGTGVLTESNKKFLPFQQFGRD

SEQ ID NO: 1597 - protein, 229 aa, synthetic construct
EVFNATRFASVYAWNRKRISNCVADYSVLYNSASFSTFKCYGVSPTKLNDLCFTNVYADSFVIRGDEVRQIAPGQTGKIADYNYKLPDDFTGCVIAWNSNNLDSKVGGNYNYLYRLFRKSNLKPFERDISTEIYQAGSTPCNGVEGFNCYFPLQSYGFQPTNGVGYQPYRVVVLSFELLHAPATVCGPKKSTNLVKNKCVNFNFNGLTGTGVLTESNKKFLPFQQFGRD

SEQ ID NO: 1598 - protein, 228 aa, synthetic construct
VFNATRFASVYAWNRKRISNCVADYSVLYNSASFSTFKCYGVSPTKLNDLCFTNVYADSFVIRGDEVRQIAPGQTGKIADYNYKLPDDFTGCVIAWNSNNLDSKVGGNYNYLYRLFRKSNLKPFERDISTEIYQAGSTPCNGVEGFNCYFPLQSYGFQPTNGVGYQPYRVVVLSFELLHAPATVCGPKKSTNLVKNKCVNFNFNGLTGTGVLTESNKKFLPFQQFGRD

SEQ ID NO: 1599 - protein, 227 aa, synthetic construct
FNATRFASVYAWNRKRISNCVADYSVLYNSASFSTFKCYGVSPTKLNDLCFTNVYADSFVIRGDEVRQIAPGQTGKIADYNYKLPDDFTGCVIAWNSNNLDSKVGGNYNYLYRLFRKSNLKPFERDISTEIYQAGSTPCNGVEGFNCYFPLQSYGFQPTNGVGYQPYRVVVLSFELLHAPATVCGPKKSTNLVKNKCVNFNFNGLTGTGVLTESNKKFLPFQQFGRD

SEQ ID NO: 1600 - protein, 226 aa, synthetic construct
NATRFASVYAWNRKRISNCVADYSVLYNSASFSTFKCYGVSPTKLNDLCFTNVYADSFVIRGDEVRQIAPGQTGKIADYNYKLPDDFTGCVIAWNSNNLDSKVGGNYNYLYRLFRKSNLKPFERDISTEIYQAGSTPCNGVEGFNCYFPLQSYGFQPTNGVGYQPYRVVVLSFELLHAPATVCGPKKSTNLVKNKCVNFNFNGLTGTGVLTESNKKFLPFQQFGRD

SEQ ID NO: 1601 - protein, 225 aa, synthetic construct
ATRFASVYAWNRKRISNCVADYSVLYNSASFSTFKCYGVSPTKLNDLCFTNVYADSFVIRGDEVRQIAPGQTGKIADYNYKLPDDFTGCVIAWNSNNLDSKVGGNYNYLYRLFRKSNLKPFERDISTEIYQAGSTPCNGVEGFNCYFPLQSYGFQPTNGVGYQPYRVVVLSFELLHAPATVCGPKKSTNLVKNKCVNFNFNGLTGTGVLTESNKKFLPFQQFGRD

SEQ ID NO: 1602 - protein, 224 aa, synthetic construct
TRFASVYAWNRKRISNCVADYSVLYNSASFSTFKCYGVSPTKLNDLCFTNVYADSFVIRGDEVRQIAPGQTGKIADYNYKLPDDFTGCVIAWNSNNLDSKVGGNYNYLYRLFRKSNLKPFERDISTEIYQAGSTPCNGVEGFNCYFPLQSYGFQPTNGVGYQPYRVVVLSFELLHAPATVCGPKKSTNLVKNKCVNFNFNGLTGTGVLTESNKKFLPFQQFGRD

SEQ ID NO: 1603 - protein, 223 aa, synthetic construct
RFASVYAWNRKRISNCVADYSVLYNSASFSTFKCYGVSPTKLNDLCFTNVYADSFVIRGDEVRQIAPGQTGKIADYNYKLPDDFTGCVIAWNSNNLDSKVGGNYNYLYRLFRKSNLKPFERDISTEIYQAGSTPCNGVEGFNCYFPLQSYGFQPTNGVGYQPYRVVVLSFELLHAPATVCGPKKSTNLVKNKCVNFNFNGLTGTGVLTESNKKFLPFQQFGRD

SEQ ID NO: 1604 - protein, 222 aa, synthetic construct
FASVYAWNRKRISNCVADYSVLYNSASFSTFKCYGVSPTKLNDLCFTNVYADSFVIRGDEVRQIAPGQTGKIADYNYKLPDDFTGCVIAWNSNNLDSKVGGNYNYLYRLFRKSNLKPFERDISTEIYQAGSTPCNGVEGFNCYFPLQSYGFQPTNGVGYQPYRVVVLSFELLHAPATVCGPKKSTNLVKNKCVNFNFNGLTGTGVLTESNKKFLPFQQFGRD

SEQ ID NO: 1605 - protein, 221 aa, synthetic construct
ASVYAWNRKRISNCVADYSVLYNSASFSTFKCYGVSPTKLNDLCFTNVYADSFVIRGDEVRQIAPGQTGKIADYNYKLPDDFTGCVIAWNSNNLDSKVGGNYNYLYRLFRKSNLKPFERDISTEIYQAGSTPCNGVEGFNCYFPLQSYGFQPTNGVGYQPYRVVVLSFELLHAPATVCGPKKSTNLVKNKCVNFNFNGLTGTGVLTESNKKFLPFQQFGRD

SEQ ID NO: 1606 - protein, 220 aa, synthetic construct
SVYAWNRKRISNCVADYSVLYNSASFSTFKCYGVSPTKLNDLCFTNVYADSFVIRGDEVRQIAPGQTGKIADYNYKLPDDFTGCVIAWNSNNLDSKVGGNYNYLYRLFRKSNLKPFERDISTEIYQAGSTPCNGVEGFNCYFPLQSYGFQPTNGVGYQPYRVVVLSFELLHAPATVCGPKKSTNLVKNKCVNFNFNGLTGTGVLTESNKKFLPFQQFGRD

SEQ ID NO: 1607 - protein, 219 aa, synthetic construct
VYAWNRKRISNCVADYSVLYNSASFSTFKCYGVSPTKLNDLCFTNVYADSFVIRGDEVRQIAPGQTGKIADYNYKLPDDFTGCVIAWNSNNLDSKVGGNYNYLYRLFRKSNLKPFERDISTEIYQAGSTPCNGVEGFNCYFPLQSYGFQPTNGVGYQPYRVVVLSFELLHAPATVCGPKKSTNLVKNKCVNFNFNGLTGTGVLTESNKKFLPFQQFGRD

SEQ ID NO: 1608 - protein, 218 aa, synthetic construct
YAWNRKRISNCVADYSVLYNSASFSTFKCYGVSPTKLNDLCFTNVYADSFVIRGDEVRQIAPGQTGKIADYNYKLPDDFTGCVIAWNSNNLDSKVGGNYNYLYRLFRKSNLKPFERDISTEIYQAGSTPCNGVEGFNCYFPLQSYGFQPTNGVGYQPYRVVVLSFELLHAPATVCGPKKSTNLVKNKCVNFNFNGLTGTGVLTESNKKFLPFQQFGRD

SEQ ID NO: 1609 - protein, 217 aa, synthetic construct
AWNRKRISNCVADYSVLYNSASFSTFKCYGVSPTKLNDLCFTNVYADSFVIRGDEVRQIAPGQTGKIADYNYKLPDDFTGCVIAWNSNNLDSKVGGNYNYLYRLFRKSNLKPFERDISTEIYQAGSTPCNGVEGFNCYFPLQSYGFQPTNGVGYQPYRVVVLSFELLHAPATVCGPKKSTNLVKNKCVNFNFNGLTGTGVLTESNKKFLPFQQFGRD

SEQ ID NO: 1610 - protein, 216 aa, synthetic construct
WNRKRISNCVADYSVLYNSASFSTFKCYGVSPTKLNDLCFTNVYADSFVIRGDEVRQIAPGQTGKIADYNYKLPDDFTGCVIAWNSNNLDSKVGGNYNYLYRLFRKSNLKPFERDISTEIYQAGSTPCNGVEGFNCYFPLQSYGFQPTNGVGYQPYRVVVLSFELLHAPATVCGPKKSTNLVKNKCVNFNFNGLTGTGVLTESNKKFLPFQQFGRD

SEQ ID NO: 1611 - protein, 215 aa, synthetic construct
NRKRISNCVADYSVLYNSASFSTFKCYGVSPTKLNDLCFTNVYADSFVIRGDEVRQIAPGQTGKIADYNYKLPDDFTGCVIAWNSNNLDSKVGGNYNYLYRLFRKSNLKPFERDISTEIYQAGSTPCNGVEGFNCYFPLQSYGFQPTNGVGYQPYRVVVLSFELLHAPATVCGPKKSTNLVKNKCVNFNFNGLTGTGVLTESNKKFLPFQQFGRD

SEQ ID NO: 1612 - protein, 214 aa, synthetic construct
RKRISNCVADYSVLYNSASFSTFKCYGVSPTKLNDLCFTNVYADSFVIRGDEVRQIAPGQTGKIADYNYKLPDDFTGCVIAWNSNNLDSKVGGNYNYLYRLFRKSNLKPFERDISTEIYQAGSTPCNGVEGFNCYFPLQSYGFQPTNGVGYQPYRVVVLSFELLHAPATVCGPKKSTNLVKNKCVNFNFNGLTGTGVLTESNKKFLPFQQFGRD

SEQ ID NO: 1613 - protein, 213 aa, synthetic construct
KRISNCVADYSVLYNSASFSTFKCYGVSPTKLNDLCFTNVYADSFVIRGDEVRQIAPGQTGKIADYNYKLPDDFTGCVIAWNSNNLDSKVGGNYNYLYRLFRKSNLKPFERDISTEIYQAGSTPCNGVEGFNCYFPLQSYGFQPTNGVGYQPYRVVVLSFELLHAPATVCGPKKSTNLVKNKCVNFNFNGLTGTGVLTESNKKFLPFQQFGRD

SEQ ID NO: 1614 - protein, 212 aa, synthetic construct
RISNCVADYSVLYNSASFSTFKCYGVSPTKLNDLCFTNVYADSFVIRGDEVRQIAPGQTGKIADYNYKLPDDFTGCVIAWNSNNLDSKVGGNYNYLYRLFRKSNLKPFERDISTEIYQAGSTPCNGVEGFNCYFPLQSYGFQPTNGVGYQPYRVVVLSFELLHAPATVCGPKKSTNLVKNKCVNFNFNGLTGTGVLTESNKKFLPFQQFGRD

SEQ ID NO: 1615 - protein, 211 aa, synthetic construct
ISNCVADYSVLYNSASFSTFKCYGVSPTKLNDLCFTNVYADSFVIRGDEVRQIAPGQTGKIADYNYKLPDDFTGCVIAWNSNNLDSKVGGNYNYLYRLFRKSNLKPFERDISTEIYQAGSTPCNGVEGFNCYFPLQSYGFQPTNGVGYQPYRVVVLSFELLHAPATVCGPKKSTNLVKNKCVNFNFNGLTGTGVLTESNKKFLPFQQFGRD

SEQ ID NO: 1616 - protein, 210 aa, synthetic construct
SNCVADYSVLYNSASFSTFKCYGVSPTKLNDLCFTNVYADSFVIRGDEVRQIAPGQTGKIADYNYKLPDDFTGCVIAWNSNNLDSKVGGNYNYLYRLFRKSNLKPFERDISTEIYQAGSTPCNGVEGFNCYFPLQSYGFQPTNGVGYQPYRVVVLSFELLHAPATVCGPKKSTNLVKNKCVNFNFNGLTGTGVLTESNKKFLPFQQFGRD

SEQ ID NO: 1617 - protein, 209 aa, synthetic construct
NCVADYSVLYNSASFSTFKCYGVSPTKLNDLCFTNVYADSFVIRGDEVRQIAPGQTGKIADYNYKLPDDFTGCVIAWNSNNLDSKVGGNYNYLYRLFRKSNLKPFERDISTEIYQAGSTPCNGVEGFNCYFPLQSYGFQPTNGVGYQPYRVVVLSFELLHAPATVCGPKKSTNLVKNKCVNFNFNGLTGTGVLTESNKKFLPFQQFGRD

SEQ ID NO: 1618 - protein, 208 aa, synthetic construct
CVADYSVLYNSASFSTFKCYGVSPTKLNDLCFTNVYADSFVIRGDEVRQIAPGQTGKIADYNYKLPDDFTGCVIAWNSNNLDSKVGGNYNYLYRLFRKSNLKPFERDISTEIYQAGSTPCNGVEGFNCYFPLQSYGFQPTNGVGYQPYRVVVLSFELLHAPATVCGPKKSTNLVKNKCVNFNFNGLTGTGVLTESNKKFLPFQQFGRD

SEQ ID NO: 1619 - protein, 207 aa, synthetic construct
VADYSVLYNSASFSTFKCYGVSPTKLNDLCFTNVYADSFVIRGDEVRQIAPGQTGKIADYNYKLPDDFTGCVIAWNSNNLDSKVGGNYNYLYRLFRKSNLKPFERDISTEIYQAGSTPCNGVEGFNCYFPLQSYGFQPTNGVGYQPYRVVVLSFELLHAPATVCGPKKSTNLVKNKCVNFNFNGLTGTGVLTESNKKFLPFQQFGRD

SEQ ID NO: 1620 - protein, 206 aa, synthetic construct
ADYSVLYNSASFSTFKCYGVSPTKLNDLCFTNVYADSFVIRGDEVRQIAPGQTGKIADYNYKLPDDFTGCVIAWNSNNLDSKVGGNYNYLYRLFRKSNLKPFERDISTEIYQAGSTPCNGVEGFNCYFPLQSYGFQPTNGVGYQPYRVVVLSFELLHAPATVCGPKKSTNLVKNKCVNFNFNGLTGTGVLTESNKKFLPFQQFGRD

SEQ ID NO: 1621 - protein, 205 aa, synthetic construct
DYSVLYNSASFSTFKCYGVSPTKLNDLCFTNVYADSFVIRGDEVRQIAPGQTGKIADYNYKLPDDFTGCVIAWNSNNLDSKVGGNYNYLYRLFRKSNLKPFERDISTEIYQAGSTPCNGVEGFNCYFPLQSYGFQPTNGVGYQPYRVVVLSFELLHAPATVCGPKKSTNLVKNKCVNFNFNGLTGTGVLTESNKKFLPFQQFGRD

SEQ ID NO: 1622 - protein, 204 aa, synthetic construct
YSVLYNSASFSTFKCYGVSPTKLNDLCFTNVYADSFVIRGDEVRQIAPGQTGKIADYNYKLPDDFTGCVIAWNSNNLDSKVGGNYNYLYRLFRKSNLKPFERDISTEIYQAGSTPCNGVEGFNCYFPLQSYGFQPTNGVGYQPYRVVVLSFELLHAPATVCGPKKSTNLVKNKCVNFNFNGLTGTGVLTESNKKFLPFQQFGRD

SEQ ID NO: 1623 - protein, 203 aa, synthetic construct
SVLYNSASFSTFKCYGVSPTKLNDLCFTNVYADSFVIRGDEVRQIAPGQTGKIADYNYKLPDDFTGCVIAWNSNNLDSKVGGNYNYLYRLFRKSNLKPFERDISTEIYQAGSTPCNGVEGFNCYFPLQSYGFQPTNGVGYQPYRVVVLSFELLHAPATVCGPKKSTNLVKNKCVNFNFNGLTGTGVLTESNKKFLPFQQFGRD

SEQ ID NO: 1624 - protein, 249 aa, synthetic construct
RVQPTESIVRFPNITNLCPFGEVFNATRFASVYAWNRKRISNCVADYSVLYNSASFSTFKCYGVSPTKLNDLCFTNVYADSFVIRGDEVRQIAPGQTGKIADYNYKLPDDFTGCVIAWNSNNLDSKVGGNYNYLYRLFRKSNLKPFERDISTEIYQAGSTPCNGVEGFNCYFPLQSYGFQPTNGVGYQPYRVVVLSFELLHAPATVCGPKKSTNLVKNKCVNFNFNGLTGTGVLTESNKKFLPFQQFGR

SEQ ID NO: 1625 - protein, 248 aa, synthetic construct
RVQPTESIVRFPNITNLCPFGEVFNATRFASVYAWNRKRISNCVADYSVLYNSASFSTFKCYGVSPTKLNDLCFTNVYADSFVIRGDEVRQIAPGQTGKIADYNYKLPDDFTGCVIAWNSNNLDSKVGGNYNYLYRLFRKSNLKPFERDISTEIYQAGSTPCNGVEGFNCYFPLQSYGFQPTNGVGYQPYRVVVLSFELLHAPATVCGPKKSTNLVKNKCVNFNFNGLTGTGVLTESNKKFLPFQQFG

SEQ ID NO: 1626 - protein, 247 aa, synthetic construct
RVQPTESIVRFPNITNLCPFGEVFNATRFASVYAWNRKRISNCVADYSVLYNSASFSTFKCYGVSPTKLNDLCFTNVYADSFVIRGDEVRQIAPGQTGKIADYNYKLPDDFTGCVIAWNSNNLDSKVGGNYNYLYRLFRKSNLKPFERDISTEIYQAGSTPCNGVEGFNCYFPLQSYGFQPTNGVGYQPYRVVVLSFELLHAPATVCGPKKSTNLVKNKCVNFNFNGLTGTGVLTESNKKFLPFQQF

SEQ ID NO: 1627 - protein, 246 aa, synthetic construct
RVQPTESIVRFPNITNLCPFGEVFNATRFASVYAWNRKRISNCVADYSVLYNSASFSTFKCYGVSPTKLNDLCFTNVYADSFVIRGDEVRQIAPGQTGKIADYNYKLPDDFTGCVIAWNSNNLDSKVGGNYNYLYRLFRKSNLKPFERDISTEIYQAGSTPCNGVEGFNCYFPLQSYGFQPTNGVGYQPYRVVVLSFELLHAPATVCGPKKSTNLVKNKCVNFNFNGLTGTGVLTESNKKFLPFQQ

SEQ ID NO: 1628 - protein, 245 aa, synthetic construct
RVQPTESIVRFPNITNLCPFGEVFNATRFASVYAWNRKRISNCVADYSVLYNSASFSTFKCYGVSPTKLNDLCFTNVYADSFVIRGDEVRQIAPGQTGKIADYNYKLPDDFTGCVIAWNSNNLDSKVGGNYNYLYRLFRKSNLKPFERDISTEIYQAGSTPCNGVEGFNCYFPLQSYGFQPTNGVGYQPYRVVVLSFELLHAPATVCGPKKSTNLVKNKCVNFNFNGLTGTGVLTESNKKFLPFQ

SEQ ID NO: 1629 - protein, 244 aa, synthetic construct
RVQPTESIVRFPNITNLCPFGEVFNATRFASVYAWNRKRISNCVADYSVLYNSASFSTFKCYGVSPTKLNDLCFTNVYADSFVIRGDEVRQIAPGQTGKIADYNYKLPDDFTGCVIAWNSNNLDSKVGGNYNYLYRLFRKSNLKPFERDISTEIYQAGSTPCNGVEGFNCYFPLQSYGFQPTNGVGYQPYRVVVLSFELLHAPATVCGPKKSTNLVKNKCVNFNFNGLTGTGVLTESNKKFLPF

SEQ ID NO: 1630 - protein, 243 aa, synthetic construct
RVQPTESIVRFPNITNLCPFGEVFNATRFASVYAWNRKRISNCVADYSVLYNSASFSTFKCYGVSPTKLNDLCFTNVYADSFVIRGDEVRQIAPGQTGKIADYNYKLPDDFTGCVIAWNSNNLDSKVGGNYNYLYRLFRKSNLKPFERDISTEIYQAGSTPCNGVEGFNCYFPLQSYGFQPTNGVGYQPYRVVVLSFELLHAPATVCGPKKSTNLVKNKCVNFNFNGLTGTGVLTESNKKFLP

SEQ ID NO: 1631 - protein, 242 aa, synthetic construct
RVQPTESIVRFPNITNLCPFGEVFNATRFASVYAWNRKRISNCVADYSVLYNSASFSTFKCYGVSPTKLNDLCFTNVYADSFVIRGDEVRQIAPGQTGKIADYNYKLPDDFTGCVIAWNSNNLDSKVGGNYNYLYRLFRKSNLKPFERDISTEIYQAGSTPCNGVEGFNCYFPLQSYGFQPTNGVGYQPYRVVVLSFELLHAPATVCGPKKSTNLVKNKCVNFNFNGLTGTGVLTESNKKFL

SEQ ID NO: 1632 - protein, 241 aa, synthetic construct
RVQPTESIVRFPNITNLCPFGEVFNATRFASVYAWNRKRISNCVADYSVLYNSASFSTFKCYGVSPTKLNDLCFTNVYADSFVIRGDEVRQIAPGQTGKIADYNYKLPDDFTGCVIAWNSNNLDSKVGGNYNYLYRLFRKSNLKPFERDISTEIYQAGSTPCNGVEGFNCYFPLQSYGFQPTNGVGYQPYRVVVLSFELLHAPATVCGPKKSTNLVKNKCVNFNFNGLTGTGVLTESNKKF

SEQ ID NO: 1633 - protein, 240 aa, synthetic construct
RVQPTESIVRFPNITNLCPFGEVFNATRFASVYAWNRKRISNCVADYSVLYNSASFSTFKCYGVSPTKLNDLCFTNVYADSFVIRGDEVRQIAPGQTGKIADYNYKLPDDFTGCVIAWNSNNLDSKVGGNYNYLYRLFRKSNLKPFERDISTEIYQAGSTPCNGVEGFNCYFPLQSYGFQPTNGVGYQPYRVVVLSFELLHAPATVCGPKKSTNLVKNKCVNFNFNGLTGTGVLTESNKK

SEQ ID NO: 1634 - protein, 239 aa, synthetic construct
RVQPTESIVRFPNITNLCPFGEVFNATRFASVYAWNRKRISNCVADYSVLYNSASFSTFKCYGVSPTKLNDLCFTNVYADSFVIRGDEVRQIAPGQTGKIADYNYKLPDDFTGCVIAWNSNNLDSKVGGNYNYLYRLFRKSNLKPFERDISTEIYQAGSTPCNGVEGFNCYFPLQSYGFQPTNGVGYQPYRVVVLSFELLHAPATVCGPKKSTNLVKNKCVNFNFNGLTGTGVLTESNK

SEQ ID NO: 1635 - protein, 238 aa, synthetic construct
RVQPTESIVRFPNITNLCPFGEVFNATRFASVYAWNRKRISNCVADYSVLYNSASFSTFKCYGVSPTKLNDLCFTNVYADSFVIRGDEVRQIAPGQTGKIADYNYKLPDDFTGCVIAWNSNNLDSKVGGNYNYLYRLFRKSNLKPFERDISTEIYQAGSTPCNGVEGFNCYFPLQSYGFQPTNGVGYQPYRVVVLSFELLHAPATVCGPKKSTNLVKNKCVNFNFNGLTGTGVLTESN

SEQ ID NO: 1636 - protein, 237 aa, synthetic construct; identical to SEQ ID NO: 37

SEQ ID NO: 1637 - protein, 236 aa, synthetic construct
RVQPTESIVRFPNITNLCPFGEVFNATRFASVYAWNRKRISNCVADYSVLYNSASFSTFKCYGVSPTKLNDLCFTNVYADSFVIRGDEVRQIAPGQTGKIADYNYKLPDDFTGCVIAWNSNNLDSKVGGNYNYLYRLFRKSNLKPFERDISTEIYQAGSTPCNGVEGFNCYFPLQSYGFQPTNGVGYQPYRVVVLSFELLHAPATVCGPKKSTNLVKNKCVNFNFNGLTGTGVLTE

SEQ ID NO: 1638 - protein, 235 aa, synthetic construct
RVQPTESIVRFPNITNLCPFGEVFNATRFASVYAWNRKRISNCVADYSVLYNSASFSTFKCYGVSPTKLNDLCFTNVYADSFVIRGDEVRQIAPGQTGKIADYNYKLPDDFTGCVIAWNSNNLDSKVGGNYNYLYRLFRKSNLKPFERDISTEIYQAGSTPCNGVEGFNCYFPLQSYGFQPTNGVGYQPYRVVVLSFELLHAPATVCGPKKSTNLVKNKCVNFNFNGLTGTGVLT

SEQ ID NO: 1639 - protein, 234 aa, synthetic construct
RVQPTESIVRFPNITNLCPFGEVFNATRFASVYAWNRKRISNCVADYSVLYNSASFSTFKCYGVSPTKLNDLCFTNVYADSFVIRGDEVRQIAPGQTGKIADYNYKLPDDFTGCVIAWNSNNLDSKVGGNYNYLYRLFRKSNLKPFERDISTEIYQAGSTPCNGVEGFNCYFPLQSYGFQPTNGVGYQPYRVVVLSFELLHAPATVCGPKKSTNLVKNKCVNFNFNGLTGTGVL

SEQ ID NO: 1640 - protein, 233 aa, synthetic construct
RVQPTESIVRFPNITNLCPFGEVFNATRFASVYAWNRKRISNCVADYSVLYNSASFSTFKCYGVSPTKLNDLCFTNVYADSFVIRGDEVRQIAPGQTGKIADYNYKLPDDFTGCVIAWNSNNLDSKVGGNYNYLYRLFRKSNLKPFERDISTEIYQAGSTPCNGVEGFNCYFPLQSYGFQPTNGVGYQPYRVVVLSFELLHAPATVCGPKKSTNLVKNKCVNFNFNGLTGTGV

SEQ ID NO: 1641 - protein, 232 aa, synthetic construct
RVQPTESIVRFPNITNLCPFGEVFNATRFASVYAWNRKRISNCVADYSVLYNSASFSTFKCYGVSPTKLNDLCFTNVYADSFVIRGDEVRQIAPGQTGKIADYNYKLPDDFTGCVIAWNSNNLDSKVGGNYNYLYRLFRKSNLKPFERDISTEIYQAGSTPCNGVEGFNCYFPLQSYGFQPTNGVGYQPYRVVVLSFELLHAPATVCGPKKSTNLVKNKCVNFNFNGLTGTG

SEQ ID NO: 1642 - protein, 231 aa, synthetic construct
RVQPTESIVRFPNITNLCPFGEVFNATRFASVYAWNRKRISNCVADYSVLYNSASFSTFKCYGVSPTKLNDLCFTNVYADSFVIRGDEVRQIAPGQTGKIADYNYKLPDDFTGCVIAWNSNNLDSKVGGNYNYLYRLFRKSNLKPFERDISTEIYQAGSTPCNGVEGFNCYFPLQSYGFQPTNGVGYQPYRVVVLSFELLHAPATVCGPKKSTNLVKNKCVNFNFNGLTGT

SEQ ID NO: 1643 - protein, 230 aa, synthetic construct
RVQPTESIVRFPNITNLCPFGEVFNATRFASVYAWNRKRISNCVADYSVLYNSASFSTFKCYGVSPTKLNDLCFTNVYADSFVIRGDEVRQIAPGQTGKIADYNYKLPDDFTGCVIAWNSNNLDSKVGGNYNYLYRLFRKSNLKPFERDISTEIYQAGSTPCNGVEGFNCYFPLQSYGFQPTNGVGYQPYRVVVLSFELLHAPATVCGPKKSTNLVKNKCVNFNFNGLTG

SEQ ID NO: 1644 - protein, 229 aa, synthetic construct
RVQPTESIVRFPNITNLCPFGEVFNATRFASVYAWNRKRISNCVADYSVLYNSASFSTFKCYGVSPTKLNDLCFTNVYADSFVIRGDEVRQIAPGQTGKIADYNYKLPDDFTGCVIAWNSNNLDSKVGGNYNYLYRLFRKSNLKPFERDISTEIYQAGSTPCNGVEGFNCYFPLQSYGFQPTNGVGYQPYRVVVLSFELLHAPATVCGPKKSTNLVKNKCVNFNFNGLT

SEQ ID NO: 1645 - protein, 228 aa, synthetic construct
RVQPTESIVRFPNITNLCPFGEVFNATRFASVYAWNRKRISNCVADYSVLYNSASFSTFKCYGVSPTKLNDLCFTNVYADSFVIRGDEVRQIAPGQTGKIADYNYKLPDDFTGCVIAWNSNNLDSKVGGNYNYLYRLFRKSNLKPFERDISTEIYQAGSTPCNGVEGFNCYFPLQSYGFQPTNGVGYQPYRVVVLSFELLHAPATVCGPKKSTNLVKNKCVNFNFNGL

SEQ ID NO: 1646 - protein, 227 aa, synthetic construct
RVQPTESIVRFPNITNLCPFGEVFNATRFASVYAWNRKRISNCVADYSVLYNSASFSTFKCYGVSPTKLNDLCFTNVYADSFVIRGDEVRQIAPGQTGKIADYNYKLPDDFTGCVIAWNSNNLDSKVGGNYNYLYRLFRKSNLKPFERDISTEIYQAGSTPCNGVEGFNCYFPLQSYGFQPTNGVGYQPYRVVVLSFELLHAPATVCGPKKSTNLVKNKCVNFNFNG

SEQ ID NO: 1647 - protein, 226 aa, synthetic construct
RVQPTESIVRFPNITNLCPFGEVFNATRFASVYAWNRKRISNCVADYSVLYNSASFSTFKCYGVSPTKLNDLCFTNVYADSFVIRGDEVRQIAPGQTGKIADYNYKLPDDFTGCVIAWNSNNLDSKVGGNYNYLYRLFRKSNLKPFERDISTEIYQAGSTPCNGVEGFNCYFPLQSYGFQPTNGVGYQPYRVVVLSFELLHAPATVCGPKKSTNLVKNKCVNFNFN

SEQ ID NO: 1648 - protein, 225 aa, synthetic construct
RVQPTESIVRFPNITNLCPFGEVFNATRFASVYAWNRKRISNCVADYSVLYNSASFSTFKCYGVSPTKLNDLCFTNVYADSFVIRGDEVRQIAPGQTGKIADYNYKLPDDFTGCVIAWNSNNLDSKVGGNYNYLYRLFRKSNLKPFERDISTEIYQAGSTPCNGVEGFNCYFPLQSYGFQPTNGVGYQPYRVVVLSFELLHAPATVCGPKKSTNLVKNKCVNFNF

SEQ ID NO: 1649 - protein, 224 aa, synthetic construct
RVQPTESIVRFPNITNLCPFGEVFNATRFASVYAWNRKRISNCVADYSVLYNSASFSTFKCYGVSPTKLNDLCFTNVYADSFVIRGDEVRQIAPGQTGKIADYNYKLPDDFTGCVIAWNSNNLDSKVGGNYNYLYRLFRKSNLKPFERDISTEIYQAGSTPCNGVEGFNCYFPLQSYGFQPTNGVGYQPYRVVVLSFELLHAPATVCGPKKSTNLVKNKCVNFN

SEQ ID NO: 1650 - protein, 223 aa, synthetic construct
RVQPTESIVRFPNITNLCPFGEVFNATRFASVYAWNRKRISNCVADYSVLYNSASFSTFKCYGVSPTKLNDLCFTNVYADSFVIRGDEVRQIAPGQTGKIADYNYKLPDDFTGCVIAWNSNNLDSKVGGNYNYLYRLFRKSNLKPFERDISTEIYQAGSTPCNGVEGFNCYFPLQSYGFQPTNGVGYQPYRVVVLSFELLHAPATVCGPKKSTNLVKNKCVNF

SEQ ID NO: 1651 - protein, 222 aa, synthetic construct
RVQPTESIVRFPNITNLCPFGEVFNATRFASVYAWNRKRISNCVADYSVLYNSASFSTFKCYGVSPTKLNDLCFTNVYADSFVIRGDEVRQIAPGQTGKIADYNYKLPDDFTGCVIAWNSNNLDSKVGGNYNYLYRLFRKSNLKPFERDISTEIYQAGSTPCNGVEGFNCYFPLQSYGFQPTNGVGYQPYRVVVLSFELLHAPATVCGPKKSTNLVKNKCVN

SEQ ID NO: 1652 - protein, 221 aa, synthetic construct
RVQPTESIVRFPNITNLCPFGEVFNATRFASVYAWNRKRISNCVADYSVLYNSASFSTFKCYGVSPTKLNDLCFTNVYADSFVIRGDEVRQIAPGQTGKIADYNYKLPDDFTGCVIAWNSNNLDSKVGGNYNYLYRLFRKSNLKPFERDISTEIYQAGSTPCNGVEGFNCYFPLQSYGFQPTNGVGYQPYRVVVLSFELLHAPATVCGPKKSTNLVKNKCV

SEQ ID NO: 1653 - protein, 220 aa, synthetic construct
RVQPTESIVRFPNITNLCPFGEVFNATRFASVYAWNRKRISNCVADYSVLYNSASFSTFKCYGVSPTKLNDLCFTNVYADSFVIRGDEVRQIAPGQTGKIADYNYKLPDDFTGCVIAWNSNNLDSKVGGNYNYLYRLFRKSNLKPFERDISTEIYQAGSTPCNGVEGFNCYFPLQSYGFQPTNGVGYQPYRVVVLSFELLHAPATVCGPKKSTNLVKNKC

SEQ ID NO: 1654 - protein, 219 aa, synthetic construct
RVQPTESIVRFPNITNLCPFGEVFNATRFASVYAWNRKRISNCVADYSVLYNSASFSTFKCYGVSPTKLNDLCFTNVYADSFVIRGDEVRQIAPGQTGKIADYNYKLPDDFTGCVIAWNSNNLDSKVGGNYNYLYRLFRKSNLKPFERDISTEIYQAGSTPCNGVEGFNCYFPLQSYGFQPTNGVGYQPYRVVVLSFELLHAPATVCGPKKSTNLVKNK

SEQ ID NO: 1655 - protein, 218 aa, synthetic construct
RVQPTESIVRFPNITNLCPFGEVFNATRFASVYAWNRKRISNCVADYSVLYNSASFSTFKCYGVSPTKLNDLCFTNVYADSFVIRGDEVRQIAPGQTGKIADYNYKLPDDFTGCVIAWNSNNLDSKVGGNYNYLYRLFRKSNLKPFERDISTEIYQAGSTPCNGVEGFNCYFPLQSYGFQPTNGVGYQPYRVVVLSFELLHAPATVCGPKKSTNLVKN

SEQ ID NO: 1656 - protein, 217 aa, synthetic construct
RVQPTESIVRFPNITNLCPFGEVFNATRFASVYAWNRKRISNCVADYSVLYNSASFSTFKCYGVSPTKLNDLCFTNVYADSFVIRGDEVRQIAPGQTGKIADYNYKLPDDFTGCVIAWNSNNLDSKVGGNYNYLYRLFRKSNLKPFERDISTEIYQAGSTPCNGVEGFNCYFPLQSYGFQPTNGVGYQPYRVVVLSFELLHAPATVCGPKKSTNLVK

SEQ ID NO: 1657 - protein, 216 aa, synthetic construct
RVQPTESIVRFPNITNLCPFGEVFNATRFASVYAWNRKRISNCVADYSVLYNSASFSTFKCYGVSPTKLNDLCFTNVYADSFVIRGDEVRQIAPGQTGKIADYNYKLPDDFTGCVIAWNSNNLDSKVGGNYNYLYRLFRKSNLKPFERDISTEIYQAGSTPCNGVEGFNCYFPLQSYGFQPTNGVGYQPYRVVVLSFELLHAPATVCGPKKSTNLV

SEQ ID NO: 1658 - protein, 215 aa, synthetic construct
RVQPTESIVRFPNITNLCPFGEVFNATRFASVYAWNRKRISNCVADYSVLYNSASFSTFKCYGVSPTKLNDLCFTNVYADSFVIRGDEVRQIAPGQTGKIADYNYKLPDDFTGCVIAWNSNNLDSKVGGNYNYLYRLFRKSNLKPFERDISTEIYQAGSTPCNGVEGFNCYFPLQSYGFQPTNGVGYQPYRVVVLSFELLHAPATVCGPKKSTNL

SEQ ID NO: 1659 - protein, 214 aa, synthetic construct
RVQPTESIVRFPNITNLCPFGEVFNATRFASVYAWNRKRISNCVADYSVLYNSASFSTFKCYGVSPTKLNDLCFTNVYADSFVIRGDEVRQIAPGQTGKIADYNYKLPDDFTGCVIAWNSNNLDSKVGGNYNYLYRLFRKSNLKPFERDISTEIYQAGSTPCNGVEGFNCYFPLQSYGFQPTNGVGYQPYRVVVLSFELLHAPATVCGPKKSTN

SEQ ID NO: 1660 - protein, 213 aa, synthetic construct
RVQPTESIVRFPNITNLCPFGEVFNATRFASVYAWNRKRISNCVADYSVLYNSASFSTFKCYGVSPTKLNDLCFTNVYADSFVIRGDEVRQIAPGQTGKIADYNYKLPDDFTGCVIAWNSNNLDSKVGGNYNYLYRLFRKSNLKPFERDISTEIYQAGSTPCNGVEGFNCYFPLQSYGFQPTNGVGYQPYRVVVLSFELLHAPATVCGPKKST

SEQ ID NO: 1661 - protein, 212 aa, synthetic construct
RVQPTESIVRFPNITNLCPFGEVFNATRFASVYAWNRKRISNCVADYSVLYNSASFSTFKCYGVSPTKLNDLCFTNVYADSFVIRGDEVRQIAPGQTGKIADYNYKLPDDFTGCVIAWNSNNLDSKVGGNYNYLYRLFRKSNLKPFERDISTEIYQAGSTPCNGVEGFNCYFPLQSYGFQPTNGVGYQPYRVVVLSFELLHAPATVCGPKKS

SEQ ID NO: 1662 - protein, 489 aa, synthetic construct
VQPTESIVRFPNITNLCPFGEVFNATRFASVYAWNRKRISNCVADYSVLYNSASFSTFKCYGVSPTKLNDLCFTNVYADSFVIRGDEVRQIAPGQTGKIADYNYKLPDDFTGCVIAWNSNNLDSKVGGNYNYLYRLFRKSNLKPFERDISTEIYQAGSTPCNGVEGFNCYFPLQSYGFQPTNGVGYQPYRVVVLSFELLHAPATVCGPKKSTNLVKNKCVNFNFNGLTGTGVLTESNKKFLPFQQFGRDGSGGGGDGGGGSGDKTHTCPPCPAPELLGGPSVFLFPPKPKDTLMISRTPEVTCVVVDVSHEDPEVKFNWYVDGVEVHNAKTKPREEQYNSTYRVVSVLTVLHQDWLNGKEYKCKVSNKALPAPIEKTISKAKGQPREPQVYTLPPSREELTKNQVSLTCLVKGFYPSDIAVEWESNGQPENNYKTTPPVLDSDGSFFLYSKLTVDKSRWQQGNVFSCSVMHEALHNHYTQKSLSLSPGS

SEQ ID NO: 1663 - protein, 488 aa, synthetic construct
QPTESIVRFPNITNLCPFGEVFNATRFASVYAWNRKRISNCVADYSVLYNSASFSTFKCYGVSPTKLNDLCFTNVYADSFVIRGDEVRQIAPGQTGKIADYNYKLPDDFTGCVIAWNSNNLDSKVGGNYNYLYRLFRKSNLKPFERDISTEIYQAGSTPCNGVEGFNCYFPLQSYGFQPTNGVGYQPYRVVVLSFELLHAPATVCGPKKSTNLVKNKCVNFNFNGLTGTGVLTESNKKFLPFQQFGRDGSGGGGDGGGGSGDKTHTCPPCPAPELLGGPSVFLFPPKPKDTLMISRTPEVTCVVVDVSHEDPEVKFNWYVDGVEVHNAKTKPREEQYNSTYRVVSVLTVLHQDWLNGKEYKCKVSNKALPAPIEKTISKAKGQPREPQVYTLPPSREELTKNQVSLTCLVKGFYPSDIAVEWESNGQPENNYKTTPPVLDSDGSFFLYSKLTVDKSRWQQGNVFSCSVMHEALHNHYTQKSLSLSPGS

SEQ ID NO: 1664 - protein, 487 aa, synthetic construct
PTESIVRFPNITNLCPFGEVFNATRFASVYAWNRKRISNCVADYSVLYNSASFSTFKCYGVSPTKLNDLCFTNVYADSFVIRGDEVRQIAPGQTGKIADYNYKLPDDFTGCVIAWNSNNLDSKVGGNYNYLYRLFRKSNLKPFERDISTEIYQAGSTPCNGVEGFNCYFPLQSYGFQPTNGVGYQPYRVVVLSFELLHAPATVCGPKKSTNLVKNKCVNFNFNGLTGTGVLTESNKKFLPFQQFGRDGSGGGGDGGGGSGDKTHTCPPCPAPELLGGPSVFLFPPKPKDTLMISRTPEVTCVVVDVSHEDPEVKFNWYVDGVEVHNAKTKPREEQYNSTYRVVSVLTVLHQDWLNGKEYKCKVSNKALPAPIEKTISKAKGQPREPQVYTLPPSREELTKNQVSLTCLVKGFYPSDIAVEWESNGQPENNYKTTPPVLDSDGSFFLYSKLTVDKSRWQQGNVFSCSVMHEALHNHYTQKSLSLSPGS

SEQ ID NO: 1665 - protein, 486 aa, synthetic construct
TESIVRFPNITNLCPFGEVFNATRFASVYAWNRKRISNCVADYSVLYNSASFSTFKCYGVSPTKLNDLCFTNVYADSFVIRGDEVRQIAPGQTGKIADYNYKLPDDFTGCVIAWNSNNLDSKVGGNYNYLYRLFRKSNLKPFERDISTEIYQAGSTPCNGVEGFNCYFPLQSYGFQPTNGVGYQPYRVVVLSFELLHAPATVCGPKKSTNLVKNKCVNFNFNGLTGTGVLTESNKKFLPFQQFGRDGSGGGGDGGGGSGDKTHTCPPCPAPELLGGPSVFLFPPKPKDTLMISRTPEVTCVVVDVSHEDPEVKFNWYVDGVEVHNAKTKPREEQYNSTYRVVSVLTVLHQDWLNGKEYKCKVSNKALPAPIEKTISKAKGQPREPQVYTLPPSREELTKNQVSLTCLVKGFYPSDIAVEWESNGQPENNYKTTPPVLDSDGSFFLYSKLTVDKSRWQQGNVFSCSVMHEALHNHYTQKSLSLSPGS

SEQ ID NO: 1666 - protein, 485 aa, synthetic construct
ESIVRFPNITNLCPFGEVFNATRFASVYAWNRKRISNCVADYSVLYNSASFSTFKCYGVSPTKLNDLCFTNVYADSFVIRGDEVRQIAPGQTGKIADYNYKLPDDFTGCVIAWNSNNLDSKVGGNYNYLYRLFRKSNLKPFERDISTEIYQAGSTPCNGVEGFNCYFPLQSYGFQPTNGVGYQPYRVVVLSFELLHAPATVCGPKKSTNLVKNKCVNFNFNGLTGTGVLTESNKKFLPFQQFGRDGSGGGGDGGGGSGDKTHTCPPCPAPELLGGPSVFLFPPKPKDTLMISRTPEVTCVVVDVSHEDPEVKFNWYVDGVEVHNAKTKPREEQYNSTYRVVSVLTVLHQDWLNGKEYKCKVSNKALPAPIEKTISKAKGQPREPQVYTLPPSREELTKNQVSLTCLVKGFYPSDIAVEWESNGQPENNYKTTPPVLDSDGSFFLYSKLTVDKSRWQQGNVFSCSVMHEALHNHYTQKSLSLSPGS

SEQ ID NO: 1667 - protein, 484 aa, synthetic construct
SIVRFPNITNLCPFGEVFNATRFASVYAWNRKRISNCVADYSVLYNSASFSTFKCYGVSPTKLNDLCFTNVYADSFVIRGDEVRQIAPGQTGKIADYNYKLPDDFTGCVIAWNSNNLDSKVGGNYNYLYRLFRKSNLKPFERDISTEIYQAGSTPCNGVEGFNCYFPLQSYGFQPTNGVGYQPYRVVVLSFELLHAPATVCGPKKSTNLVKNKCVNFNFNGLTGTGVLTESNKKFLPFQQFGRDGSGGGGDGGGGSGDKTHTCPPCPAPELLGGPSVFLFPPKPKDTLMISRTPEVTCVVVDVSHEDPEVKFNWYVDGVEVHNAKTKPREEQYNSTYRVVSVLTVLHQDWLNGKEYKCKVSNKALPAPIEKTISKAKGQPREPQVYTLPPSREELTKNQVSLTCLVKGFYPSDIAVEWESNGQPENNYKTTPPVLDSDGSFFLYSKLTVDKSRWQQGNVFSCSVMHEALHNHYTQKSLSLSPGS

SEQ ID NO: 1668 - protein, 483 aa, synthetic construct
IVRFPNITNLCPFGEVFNATRFASVYAWNRKRISNCVADYSVLYNSASFSTFKCYGVSPTKLNDLCFTNVYADSFVIRGDEVRQIAPGQTGKIADYNYKLPDDFTGCVIAWNSNNLDSKVGGNYNYLYRLFRKSNLKPFERDISTEIYQAGSTPCNGVEGFNCYFPLQSYGFQPTNGVGYQPYRVVVLSFELLHAPATVCGPKKSTNLVKNKCVNFNFNGLTGTGVLTESNKKFLPFQQFGRDGSGGGGDGGGGSGDKTHTCPPCPAPELLGGPSVFLFPPKPKDTLMISRTPEVTCVVVDVSHEDPEVKFNWYVDGVEVHNAKTKPREEQYNSTYRVVSVLTVLHQDWLNGKEYKCKVSNKALPAPIEKTISKAKGQPREPQVYTLPPSREELTKNQVSLTCLVKGFYPSDIAVEWESNGQPENNYKTTPPVLDSDGSFFLYSKLTVDKSRWQQGNVFSCSVMHEALHNHYTQKSLSLSPGS

SEQ ID NO: 1669 - protein, 482 aa, synthetic construct
VRFPNITNLCPFGEVFNATRFASVYAWNRKRISNCVADYSVLYNSASFSTFKCYGVSPTKLNDLCFTNVYADSFVIRGDEVRQIAPGQTGKIADYNYKLPDDFTGCVIAWNSNNLDSKVGGNYNYLYRLFRKSNLKPFERDISTEIYQAGSTPCNGVEGFNCYFPLQSYGFQPTNGVGYQPYRVVVLSFELLHAPATVCGPKKSTNLVKNKCVNFNFNGLTGTGVLTESNKKFLPFQQFGRDGSGGGGDGGGGSGDKTHTCPPCPAPELLGGPSVFLFPPKPKDTLMISRTPEVTCVVVDVSHEDPEVKFNWYVDGVEVHNAKTKPREEQYNSTYRVVSVLTVLHQDWLNGKEYKCKVSNKALPAPIEKTISKAKGQPREPQVYTLPPSREELTKNQVSLTCLVKGFYPSDIAVEWESNGQPENNYKTTPPVLDSDGSFFLYSKLTVDKSRWQQGNVFSCSVMHEALHNHYTQKSLSLSPGS

SEQ ID NO: 1670 - protein, 481 aa, synthetic construct
RFPNITNLCPFGEVFNATRFASVYAWNRKRISNCVADYSVLYNSASFSTFKCYGVSPTKLNDLCFTNVYADSFVIRGDEVRQIAPGQTGKIADYNYKLPDDFTGCVIAWNSNNLDSKVGGNYNYLYRLFRKSNLKPFERDISTEIYQAGSTPCNGVEGFNCYFPLQSYGFQPTNGVGYQPYRVVVLSFELLHAPATVCGPKKSTNLVKNKCVNFNFNGLTGTGVLTESNKKFLPFQQFGRDGSGGGGDGGGGSGDKTHTCPPCPAPELLGGPSVFLFPPKPKDTLMISRTPEVTCVVVDVSHEDPEVKFNWYVDGVEVHNAKTKPREEQYNSTYRVVSVLTVLHQDWLNGKEYKCKVSNKALPAPIEKTISKAKGQPREPQVYTLPPSREELTKNQVSLTCLVKGFYPSDIAVEWESNGQPENNYKTTPPVLDSDGSFFLYSKLTVDKSRWQQGNVFSCSVMHEALHNHYTQKSLSLSPGS

SEQ ID NO: 1671 - protein, 480 aa, synthetic construct
FPNITNLCPFGEVFNATRFASVYAWNRKRISNCVADYSVLYNSASFSTFKCYGVSPTKLNDLCFTNVYADSFVIRGDEVRQIAPGQTGKIADYNYKLPDDFTGCVIAWNSNNLDSKVGGNYNYLYRLFRKSNLKPFERDISTEIYQAGSTPCNGVEGFNCYFPLQSYGFQPTNGVGYQPYRVVVLSFELLHAPATVCGPKKSTNLVKNKCVNFNFNGLTGTGVLTESNKKFLPFQQFGRDGSGGGGDGGGGSGDKTHTCPPCPAPELLGGPSVFLFPPKPKDTLMISRTPEVTCVVVDVSHEDPEVKFNWYVDGVEVHNAKTKPREEQYNSTYRVVSVLTVLHQDWLNGKEYKCKVSNKALPAPIEKTISKAKGQPREPQVYTLPPSREELTKNQVSLTCLVKGFYPSDIAVEWESNGQPENNYKTTPPVLDSDGSFFLYSKLTVDKSRWQQGNVFSCSVMHEALHNHYTQKSLSLSPGS

SEQ ID NO: 1672 - protein, 479 aa, synthetic construct
PNITNLCPFGEVFNATRFASVYAWNRKRISNCVADYSVLYNSASFSTFKCYGVSPTKLNDLCFTNVYADSFVIRGDEVRQIAPGQTGKIADYNYKLPDDFTGCVIAWNSNNLDSKVGGNYNYLYRLFRKSNLKPFERDISTEIYQAGSTPCNGVEGFNCYFPLQSYGFQPTNGVGYQPYRVVVLSFELLHAPATVCGPKKSTNLVKNKCVNFNFNGLTGTGVLTESNKKFLPFQQFGRDGSGGGGDGGGGSGDKTHTCPPCPAPELLGGPSVFLFPPKPKDTLMISRTPEVTCVVVDVSHEDPEVKFNWYVDGVEVHNAKTKPREEQYNSTYRVVSVLTVLHQDWLNGKEYKCKVSNKALPAPIEKTISKAKGQPREPQVYTLPPSREELTKNQVSLTCLVKGFYPSDIAVEWESNGQPENNYKTTPPVLDSDGSFFLYSKLTVDKSRWQQGNVFSCSVMHEALHNHYTQKSLSLSPGS

SEQ ID NO: 1673 - protein, 478 aa, synthetic construct; identical to SEQ ID NO: 121

SEQ ID NO: 1674 - protein, 477 aa, synthetic construct
ITNLCPFGEVFNATRFASVYAWNRKRISNCVADYSVLYNSASFSTFKCYGVSPTKLNDLCFTNVYADSFVIRGDEVRQIAPGQTGKIADYNYKLPDDFTGCVIAWNSNNLDSKVGGNYNYLYRLFRKSNLKPFERDISTEIYQAGSTPCNGVEGFNCYFPLQSYGFQPTNGVGYQPYRVVVLSFELLHAPATVCGPKKSTNLVKNKCVNFNFNGLTGTGVLTESNKKFLPFQQFGRDGSGGGGDGGGGSGDKTHTCPPCPAPELLGGPSVFLFPPKPKDTLMISRTPEVTCVVVDVSHEDPEVKFNWYVDGVEVHNAKTKPREEQYNSTYRVVSVLTVLHQDWLNGKEYKCKVSNKALPAPIEKTISKAKGQPREPQVYTLPPSREELTKNQVSLTCLVKGFYPSDIAVEWESNGQPENNYKTTPPVLDSDGSFFLYSKLTVDKSRWQQGNVFSCSVMHEALHNHYTQKSLSLSPGS

SEQ ID NO: 1675 - protein, 476 aa, synthetic construct
TNLCPFGEVFNATRFASVYAWNRKRISNCVADYSVLYNSASFSTFKCYGVSPTKLNDLCFTNVYADSFVIRGDEVRQIAPGQTGKIADYNYKLPDDFTGCVIAWNSNNLDSKVGGNYNYLYRLFRKSNLKPFERDISTEIYQAGSTPCNGVEGFNCYFPLQSYGFQPTNGVGYQPYRVVVLSFELLHAPATVCGPKKSTNLVKNKCVNFNFNGLTGTGVLTESNKKFLPFQQFGRDGSGGGGDGGGGSGDKTHTCPPCPAPELLGGPSVFLFPPKPKDTLMISRTPEVTCVVVDVSHEDPEVKFNWYVDGVEVHNAKTKPREEQYNSTYRVVSVLTVLHQDWLNGKEYKCKVSNKALPAPIEKTISKAKGQPREPQVYTLPPSREELTKNQVSLTCLVKGFYPSDIAVEWESNGQPENNYKTTPPVLDSDGSFFLYSKLTVDKSRWQQGNVFSCSVMHEALHNHYTQKSLSLSPGS

SEQ ID NO: 1676 - protein, 475 aa, synthetic construct
NLCPFGEVFNATRFASVYAWNRKRISNCVADYSVLYNSASFSTFKCYGVSPTKLNDLCFTNVYADSFVIRGDEVRQIAPGQTGKIADYNYKLPDDFTGCVIAWNSNNLDSKVGGNYNYLYRLFRKSNLKPFERDISTEIYQAGSTPCNGVEGFNCYFPLQSYGFQPTNGVGYQPYRVVVLSFELLHAPATVCGPKKSTNLVKNKCVNFNFNGLTGTGVLTESNKKFLPFQQFGRDGSGGGGDGGGGSGDKTHTCPPCPAPELLGGPSVFLFPPKPKDTLMISRTPEVTCVVVDVSHEDPEVKFNWYVDGVEVHNAKTKPREEQYNSTYRVVSVLTVLHQDWLNGKEYKCKVSNKALPAPIEKTISKAKGQPREPQVYTLPPSREELTKNQVSLTCLVKGFYPSDIAVEWESNGQPENNYKTTPPVLDSDGSFFLYSKLTVDKSRWQQGNVFSCSVMHEALHNHYTQKSLSLSPGS

SEQ ID NO: 1677 - protein, 474 aa, synthetic construct
LCPFGEVFNATRFASVYAWNRKRISNCVADYSVLYNSASFSTFKCYGVSPTKLNDLCFTNVYADSFVIRGDEVRQIAPGQTGKIADYNYKLPDDFTGCVIAWNSNNLDSKVGGNYNYLYRLFRKSNLKPFERDISTEIYQAGSTPCNGVEGFNCYFPLQSYGFQPTNGVGYQPYRVVVLSFELLHAPATVCGPKKSTNLVKNKCVNFNFNGLTGTGVLTESNKKFLPFQQFGRDGSGGGGDGGGGSGDKTHTCPPCPAPELLGGPSVFLFPPKPKDTLMISRTPEVTCVVVDVSHEDPEVKFNWYVDGVEVHNAKTKPREEQYNSTYRVVSVLTVLHQDWLNGKEYKCKVSNKALPAPIEKTISKAKGQPREPQVYTLPPSREELTKNQVSLTCLVKGFYPSDIAVEWESNGQPENNYKTTPPVLDSDGSFFLYSKLTVDKSRWQQGNVFSCSVMHEALHNHYTQKSLSLSPGS

SEQ ID NO: 1678 - protein, 473 aa, synthetic construct
CPFGEVFNATRFASVYAWNRKRISNCVADYSVLYNSASFSTFKCYGVSPTKLNDLCFTNVYADSFVIRGDEVRQIAPGQTGKIADYNYKLPDDFTGCVIAWNSNNLDSKVGGNYNYLYRLFRKSNLKPFERDISTEIYQAGSTPCNGVEGFNCYFPLQSYGFQPTNGVGYQPYRVVVLSFELLHAPATVCGPKKSTNLVKNKCVNFNFNGLTGTGVLTESNKKFLPFQQFGRDGSGGGGDGGGGSGDKTHTCPPCPAPELLGGPSVFLFPPKPKDTLMISRTPEVTCVVVDVSHEDPEVKFNWYVDGVEVHNAKTKPREEQYNSTYRVVSVLTVLHQDWLNGKEYKCKVSNKALPAPIEKTISKAKGQPREPQVYTLPPSREELTKNQVSLTCLVKGFYPSDIAVEWESNGQPENNYKTTPPVLDSDGSFFLYSKLTVDKSRWQQGNVFSCSVMHEALHNHYTQKSLSLSPGS

SEQ ID NO: 1679 - protein, 472 aa, synthetic construct
PFGEVFNATRFASVYAWNRKRISNCVADYSVLYNSASFSTFKCYGVSPTKLNDLCFTNVYADSFVIRGDEVRQIAPGQTGKIADYNYKLPDDFTGCVIAWNSNNLDSKVGGNYNYLYRLFRKSNLKPFERDISTEIYQAGSTPCNGVEGFNCYFPLQSYGFQPTNGVGYQPYRVVVLSFELLHAPATVCGPKKSTNLVKNKCVNFNFNGLTGTGVLTESNKKFLPFQQFGRDGSGGGGDGGGGSGDKTHTCPPCPAPELLGGPSVFLFPPKPKDTLMISRTPEVTCVVVDVSHEDPEVKFNWYVDGVEVHNAKTKPREEQYNSTYRVVSVLTVLHQDWLNGKEYKCKVSNKALPAPIEKTISKAKGQPREPQVYTLPPSREELTKNQVSLTCLVKGFYPSDIAVEWESNGQPENNYKTTPPVLDSDGSFFLYSKLTVDKSRWQQGNVFSCSVMHEALHNHYTQKSLSLSPGS

SEQ ID NO: 1680 - protein, 471 aa, synthetic construct
FGEVFNATRFASVYAWNRKRISNCVADYSVLYNSASFSTFKCYGVSPTKLNDLCFTNVYADSFVIRGDEVRQIAPGQTGKIADYNYKLPDDFTGCVIAWNSNNLDSKVGGNYNYLYRLFRKSNLKPFERDISTEIYQAGSTPCNGVEGFNCYFPLQSYGFQPTNGVGYQPYRVVVLSFELLHAPATVCGPKKSTNLVKNKCVNFNFNGLTGTGVLTESNKKFLPFQQFGRDGSGGGGDGGGGSGDKTHTCPPCPAPELLGGPSVFLFPPKPKDTLMISRTPEVTCVVVDVSHEDPEVKFNWYVDGVEVHNAKTKPREEQYNSTYRVVSVLTVLHQDWLNGKEYKCKVSNKALPAPIEKTISKAKGQPREPQVYTLPPSREELTKNQVSLTCLVKGFYPSDIAVEWESNGQPENNYKTTPPVLDSDGSFFLYSKLTVDKSRWQQGNVFSCSVMHEALHNHYTQKSLSLSPGS

SEQ ID NO: 1681 - protein, 470 aa, synthetic construct
GEVFNATRFASVYAWNRKRISNCVADYSVLYNSASFSTFKCYGVSPTKLNDLCFTNVYADSFVIRGDEVRQIAPGQTGKIADYNYKLPDDFTGCVIAWNSNNLDSKVGGNYNYLYRLFRKSNLKPFERDISTEIYQAGSTPCNGVEGFNCYFPLQSYGFQPTNGVGYQPYRVVVLSFELLHAPATVCGPKKSTNLVKNKCVNFNFNGLTGTGVLTESNKKFLPFQQFGRDGSGGGGDGGGGSGDKTHTCPPCPAPELLGGPSVFLFPPKPKDTLMISRTPEVTCVVVDVSHEDPEVKFNWYVDGVEVHNAKTKPREEQYNSTYRVVSVLTVLHQDWLNGKEYKCKVSNKALPAPIEKTISKAKGQPREPQVYTLPPSREELTKNQVSLTCLVKGFYPSDIAVEWESNGQPENNYKTTPPVLDSDGSFFLYSKLTVDKSRWQQGNVFSCSVMHEALHNHYTQKSLSLSPGS

SEQ ID NO: 1682 - protein, 469 aa, synthetic construct
EVFNATRFASVYAWNRKRISNCVADYSVLYNSASFSTFKCYGVSPTKLNDLCFTNVYADSFVIRGDEVRQIAPGQTGKIADYNYKLPDDFTGCVIAWNSNNLDSKVGGNYNYLYRLFRKSNLKPFERDISTEIYQAGSTPCNGVEGFNCYFPLQSYGFQPTNGVGYQPYRVVVLSFELLHAPATVCGPKKSTNLVKNKCVNFNFNGLTGTGVLTESNKKFLPFQQFGRDGSGGGGDGGGGSGDKTHTCPPCPAPELLGGPSVFLFPPKPKDTLMISRTPEVTCVVVDVSHEDPEVKFNWYVDGVEVHNAKTKPREEQYNSTYRVVSVLTVLHQDWLNGKEYKCKVSNKALPAPIEKTISKAKGQPREPQVYTLPPSREELTKNQVSLTCLVKGFYPSDIAVEWESNGQPENNYKTTPPVLDSDGSFFLYSKLTVDKSRWQQGNVFSCSVMHEALHNHYTQKSLSLSPGS

SEQ ID NO: 1683 - protein, 468 aa, synthetic construct
VFNATRFASVYAWNRKRISNCVADYSVLYNSASFSTFKCYGVSPTKLNDLCFTNVYADSFVIRGDEVRQIAPGQTGKIADYNYKLPDDFTGCVIAWNSNNLDSKVGGNYNYLYRLFRKSNLKPFERDISTEIYQAGSTPCNGVEGFNCYFPLQSYGFQPTNGVGYQPYRVVVLSFELLHAPATVCGPKKSTNLVKNKCVNFNFNGLTGTGVLTESNKKFLPFQQFGRDGSGGGGDGGGGSGDKTHTCPPCPAPELLGGPSVFLFPPKPKDTLMISRTPEVTCVVVDVSHEDPEVKFNWYVDGVEVHNAKTKPREEQYNSTYRVVSVLTVLHQDWLNGKEYKCKVSNKALPAPIEKTISKAKGQPREPQVYTLPPSREELTKNQVSLTCLVKGFYPSDIAVEWESNGQPENNYKTTPPVLDSDGSFFLYSKLTVDKSRWQQGNVFSCSVMHEALHNHYTQKSLSLSPGS

SEQ ID NO: 1684 - protein, 467 aa, synthetic construct
FNATRFASVYAWNRKRISNCVADYSVLYNSASFSTFKCYGVSPTKLNDLCFTNVYADSFVIRGDEVRQIAPGQTGKIADYNYKLPDDFTGCVIAWNSNNLDSKVGGNYNYLYRLFRKSNLKPFERDISTEIYQAGSTPCNGVEGFNCYFPLQSYGFQPTNGVGYQPYRVVVLSFELLHAPATVCGPKKSTNLVKNKCVNFNFNGLTGTGVLTESNKKFLPFQQFGRDGSGGGGDGGGGSGDKTHTCPPCPAPELLGGPSVFLFPPKPKDTLMISRTPEVTCVVVDVSHEDPEVKFNWYVDGVEVHNAKTKPREEQYNSTYRVVSVLTVLHQDWLNGKEYKCKVSNKALPAPIEKTISKAKGQPREPQVYTLPPSREELTKNQVSLTCLVKGFYPSDIAVEWESNGQPENNYKTTPPVLDSDGSFFLYSKLTVDKSRWQQGNVFSCSVMHEALHNHYTQKSLSLSPGS

SEQ ID NO: 1685 - protein, 466 aa, synthetic construct
NATRFASVYAWNRKRISNCVADYSVLYNSASFSTFKCYGVSPTKLNDLCFTNVYADSFVIRGDEVRQIAPGQTGKIADYNYKLPDDFTGCVIAWNSNNLDSKVGGNYNYLYRLFRKSNLKPFERDISTEIYQAGSTPCNGVEGFNCYFPLQSYGFQPTNGVGYQPYRVVVLSFELLHAPATVCGPKKSTNLVKNKCVNFNFNGLTGTGVLTESNKKFLPFQQFGRDGSGGGGDGGGGSGDKTHTCPPCPAPELLGGPSVFLFPPKPKDTLMISRTPEVTCVVVDVSHEDPEVKFNWYVDGVEVHNAKTKPREEQYNSTYRVVSVLTVLHQDWLNGKEYKCKVSNKALPAPIEKTISKAKGQPREPQVYTLPPSREELTKNQVSLTCLVKGFYPSDIAVEWESNGQPENNYKTTPPVLDSDGSFFLYSKLTVDKSRWQQGNVFSCSVMHEALHNHYTQKSLSLSPGS

SEQ ID NO: 1686 - protein, 465 aa, synthetic construct
ATRFASVYAWNRKRISNCVADYSVLYNSASFSTFKCYGVSPTKLNDLCFTNVYADSFVIRGDEVRQIAPGQTGKIADYNYKLPDDFTGCVIAWNSNNLDSKVGGNYNYLYRLFRKSNLKPFERDISTEIYQAGSTPCNGVEGFNCYFPLQSYGFQPTNGVGYQPYRVVVLSFELLHAPATVCGPKKSTNLVKNKCVNFNFNGLTGTGVLTESNKKFLPFQQFGRDGSGGGGDGGGGSGDKTHTCPPCPAPELLGGPSVFLFPPKPKDTLMISRTPEVTCVVVDVSHEDPEVKFNWYVDGVEVHNAKTKPREEQYNSTYRVVSVLTVLHQDWLNGKEYKCKVSNKALPAPIEKTISKAKGQPREPQVYTLPPSREELTKNQVSLTCLVKGFYPSDIAVEWESNGQPENNYKTTPPVLDSDGSFFLYSKLTVDKSRWQQGNVFSCSVMHEALHNHYTQKSLSLSPGS

SEQ ID NO: 1687 - protein, 464 aa, synthetic construct
TRFASVYAWNRKRISNCVADYSVLYNSASFSTFKCYGVSPTKLNDLCFTNVYADSFVIRGDEVRQIAPGQTGKIADYNYKLPDDFTGCVIAWNSNNLDSKVGGNYNYLYRLFRKSNLKPFERDISTEIYQAGSTPCNGVEGFNCYFPLQSYGFQPTNGVGYQPYRVVVLSFELLHAPATVCGPKKSTNLVKNKCVNFNFNGLTGTGVLTESNKKFLPFQQFGRDGSGGGGDGGGGSGDKTHTCPPCPAPELLGGPSVFLFPPKPKDTLMISRTPEVTCVVVDVSHEDPEVKFNWYVDGVEVHNAKTKPREEQYNSTYRVVSVLTVLHQDWLNGKEYKCKVSNKALPAPIEKTISKAKGQPREPQVYTLPPSREELTKNQVSLTCLVKGFYPSDIAVEWESNGQPENNYKTTPPVLDSDGSFFLYSKLTVDKSRWQQGNVFSCSVMHEALHNHYTQKSLSLSPGS

SEQ ID NO: 1688 - protein, 463 aa, synthetic construct
RFASVYAWNRKRISNCVADYSVLYNSASFSTFKCYGVSPTKLNDLCFTNVYADSFVIRGDEVRQIAPGQTGKIADYNYKLPDDFTGCVIAWNSNNLDSKVGGNYNYLYRLFRKSNLKPFERDISTEIYQAGSTPCNGVEGFNCYFPLQSYGFQPTNGVGYQPYRVVVLSFELLHAPATVCGPKKSTNLVKNKCVNFNFNGLTGTGVLTESNKKFLPFQQFGRDGSGGGGDGGGGSGDKTHTCPPCPAPELLGGPSVFLFPPKPKDTLMISRTPEVTCVVVDVSHEDPEVKFNWYVDGVEVHNAKTKPREEQYNSTYRVVSVLTVLHQDWLNGKEYKCKVSNKALPAPIEKTISKAKGQPREPQVYTLPPSREELTKNQVSLTCLVKGFYPSDIAVEWESNGQPENNYKTTPPVLDSDGSFFLYSKLTVDKSRWQQGNVFSCSVMHEALHNHYTQKSLSLSPGS

SEQ ID NO: 1689 - protein, 462 aa, synthetic construct
FASVYAWNRKRISNCVADYSVLYNSASFSTFKCYGVSPTKLNDLCFTNVYADSFVIRGDEVRQIAPGQTGKIADYNYKLPDDFTGCVIAWNSNNLDSKVGGNYNYLYRLFRKSNLKPFERDISTEIYQAGSTPCNGVEGFNCYFPLQSYGFQPTNGVGYQPYRVVVLSFELLHAPATVCGPKKSTNLVKNKCVNFNFNGLTGTGVLTESNKKFLPFQQFGRDGSGGGGDGGGGSGDKTHTCPPCPAPELLGGPSVFLFPPKPKDTLMISRTPEVTCVVVDVSHEDPEVKFNWYVDGVEVHNAKTKPREEQYNSTYRVVSVLTVLHQDWLNGKEYKCKVSNKALPAPIEKTISKAKGQPREPQVYTLPPSREELTKNQVSLTCLVKGFYPSDIAVEWESNGQPENNYKTTPPVLDSDGSFFLYSKLTVDKSRWQQGNVFSCSVMHEALHNHYTQKSLSLSPGS

SEQ ID NO: 1690 - protein, 461 aa, synthetic construct
ASVYAWNRKRISNCVADYSVLYNSASFSTFKCYGVSPTKLNDLCFTNVYADSFVIRGDEVRQIAPGQTGKIADYNYKLPDDFTGCVIAWNSNNLDSKVGGNYNYLYRLFRKSNLKPFERDISTEIYQAGSTPCNGVEGFNCYFPLQSYGFQPTNGVGYQPYRVVVLSFELLHAPATVCGPKKSTNLVKNKCVNFNFNGLTGTGVLTESNKKFLPFQQFGRDGSGGGGDGGGGSGDKTHTCPPCPAPELLGGPSVFLFPPKPKDTLMISRTPEVTCVVVDVSHEDPEVKFNWYVDGVEVHNAKTKPREEQYNSTYRVVSVLTVLHQDWLNGKEYKCKVSNKALPAPIEKTISKAKGQPREPQVYTLPPSREELTKNQVSLTCLVKGFYPSDIAVEWESNGQPENNYKTTPPVLDSDGSFFLYSKLTVDKSRWQQGNVFSCSVMHEALHNHYTQKSLSLSPGS

SEQ ID NO: 1691 - protein, 460 aa, synthetic construct
SVYAWNRKRISNCVADYSVLYNSASFSTFKCYGVSPTKLNDLCFTNVYADSFVIRGDEVRQIAPGQTGKIADYNYKLPDDFTGCVIAWNSNNLDSKVGGNYNYLYRLFRKSNLKPFERDISTEIYQAGSTPCNGVEGFNCYFPLQSYGFQPTNGVGYQPYRVVVLSFELLHAPATVCGPKKSTNLVKNKCVNFNFNGLTGTGVLTESNKKFLPFQQFGRDGSGGGGDGGGGSGDKTHTCPPCPAPELLGGPSVFLFPPKPKDTLMISRTPEVTCVVVDVSHEDPEVKFNWYVDGVEVHNAKTKPREEQYNSTYRVVSVLTVLHQDWLNGKEYKCKVSNKALPAPIEKTISKAKGQPREPQVYTLPPSREELTKNQVSLTCLVKGFYPSDIAVEWESNGQPENNYKTTPPVLDSDGSFFLYSKLTVDKSRWQQGNVFSCSVMHEALHNHYTQKSLSLSPGS

SEQ ID NO: 1692 - protein, 459 aa, synthetic construct
VYAWNRKRISNCVADYSVLYNSASFSTFKCYGVSPTKLNDLCFTNVYADSFVIRGDEVRQIAPGQTGKIADYNYKLPDDFTGCVIAWNSNNLDSKVGGNYNYLYRLFRKSNLKPFERDISTEIYQAGSTPCNGVEGFNCYFPLQSYGFQPTNGVGYQPYRVVVLSFELLHAPATVCGPKKSTNLVKNKCVNFNFNGLTGTGVLTESNKKFLPFQQFGRDGSGGGGDGGGGSGDKTHTCPPCPAPELLGGPSVFLFPPKPKDTLMISRTPEVTCVVVDVSHEDPEVKFNWYVDGVEVHNAKTKPREEQYNSTYRVVSVLTVLHQDWLNGKEYKCKVSNKALPAPIEKTISKAKGQPREPQVYTLPPSREELTKNQVSLTCLVKGFYPSDIAVEWESNGQPENNYKTTPPVLDSDGSFFLYSKLTVDKSRWQQGNVFSCSVMHEALHNHYTQKSLSLSPGS

SEQ ID NO: 1693 - protein, 458 aa, synthetic construct
YAWNRKRISNCVADYSVLYNSASFSTFKCYGVSPTKLNDLCFTNVYADSFVIRGDEVRQIAPGQTGKIADYNYKLPDDFTGCVIAWNSNNLDSKVGGNYNYLYRLFRKSNLKPFERDISTEIYQAGSTPCNGVEGFNCYFPLQSYGFQPTNGVGYQPYRVVVLSFELLHAPATVCGPKKSTNLVKNKCVNFNFNGLTGTGVLTESNKKFLPFQQFGRDGSGGGGDGGGGSGDKTHTCPPCPAPELLGGPSVFLFPPKPKDTLMISRTPEVTCVVVDVSHEDPEVKFNWYVDGVEVHNAKTKPREEQYNSTYRVVSVLTVLHQDWLNGKEYKCKVSNKALPAPIEKTISKAKGQPREPQVYTLPPSREELTKNQVSLTCLVKGFYPSDIAVEWESNGQPENNYKTTPPVLDSDGSFFLYSKLTVDKSRWQQGNVFSCSVMHEALHNHYTQKSLSLSPGS

SEQ ID NO: 1694 - protein, 457 aa, synthetic construct
AWNRKRISNCVADYSVLYNSASFSTFKCYGVSPTKLNDLCFTNVYADSFVIRGDEVRQIAPGQTGKIADYNYKLPDDFTGCVIAWNSNNLDSKVGGNYNYLYRLFRKSNLKPFERDISTEIYQAGSTPCNGVEGFNCYFPLQSYGFQPTNGVGYQPYRVVVLSFELLHAPATVCGPKKSTNLVKNKCVNFNFNGLTGTGVLTESNKKFLPFQQFGRDGSGGGGDGGGGSGDKTHTCPPCPAPELLGGPSVFLFPPKPKDTLMISRTPEVTCVVVDVSHEDPEVKFNWYVDGVEVHNAKTKPREEQYNSTYRVVSVLTVLHQDWLNGKEYKCKVSNKALPAPIEKTISKAKGQPREPQVYTLPPSREELTKNQVSLTCLVKGFYPSDIAVEWESNGQPENNYKTTPPVLDSDGSFFLYSKLTVDKSRWQQGNVFSCSVMHEALHNHYTQKSLSLSPGS

SEQ ID NO: 1695 - protein, 456 aa, synthetic construct
WNRKRISNCVADYSVLYNSASFSTFKCYGVSPTKLNDLCFTNVYADSFVIRGDEVRQIAPGQTGKIADYNYKLPDDFTGCVIAWNSNNLDSKVGGNYNYLYRLFRKSNLKPFERDISTEIYQAGSTPCNGVEGFNCYFPLQSYGFQPTNGVGYQPYRVVVLSFELLHAPATVCGPKKSTNLVKNKCVNFNFNGLTGTGVLTESNKKFLPFQQFGRDGSGGGGDGGGGSGDKTHTCPPCPAPELLGGPSVFLFPPKPKDTLMISRTPEVTCVVVDVSHEDPEVKFNWYVDGVEVHNAKTKPREEQYNSTYRVVSVLTVLHQDWLNGKEYKCKVSNKALPAPIEKTISKAKGQPREPQVYTLPPSREELTKNQVSLTCLVKGFYPSDIAVEWESNGQPENNYKTTPPVLDSDGSFFLYSKLTVDKSRWQQGNVFSCSVMHEALHNHYTQKSLSLSPGS

SEQ ID NO: 1696 - protein, 455 aa, synthetic construct
NRKRISNCVADYSVLYNSASFSTFKCYGVSPTKLNDLCFTNVYADSFVIRGDEVRQIAPGQTGKIADYNYKLPDDFTGCVIAWNSNNLDSKVGGNYNYLYRLFRKSNLKPFERDISTEIYQAGSTPCNGVEGFNCYFPLQSYGFQPTNGVGYQPYRVVVLSFELLHAPATVCGPKKSTNLVKNKCVNFNFNGLTGTGVLTESNKKFLPFQQFGRDGSGGGGDGGGGSGDKTHTCPPCPAPELLGGPSVFLFPPKPKDTLMISRTPEVTCVVVDVSHEDPEVKFNWYVDGVEVHNAKTKPREEQYNSTYRVVSVLTVLHQDWLNGKEYKCKVSNKALPAPIEKTISKAKGQPREPQVYTLPPSREELTKNQVSLTCLVKGFYPSDIAVEWESNGQPENNYKTTPPVLDSDGSFFLYSKLTVDKSRWQQGNVFSCSVMHEALHNHYTQKSLSLSPGS

SEQ ID NO: 1697 - protein, 454 aa, synthetic construct
RKRISNCVADYSVLYNSASFSTFKCYGVSPTKLNDLCFTNVYADSFVIRGDEVRQIAPGQTGKIADYNYKLPDDFTGCVIAWNSNNLDSKVGGNYNYLYRLFRKSNLKPFERDISTEIYQAGSTPCNGVEGFNCYFPLQSYGFQPTNGVGYQPYRVVVLSFELLHAPATVCGPKKSTNLVKNKCVNFNFNGLTGTGVLTESNKKFLPFQQFGRDGSGGGGDGGGGSGDKTHTCPPCPAPELLGGPSVFLFPPKPKDTLMISRTPEVTCVVVDVSHEDPEVKFNWYVDGVEVHNAKTKPREEQYNSTYRVVSVLTVLHQDWLNGKEYKCKVSNKALPAPIEKTISKAKGQPREPQVYTLPPSREELTKNQVSLTCLVKGFYPSDIAVEWESNGQPENNYKTTPPVLDSDGSFFLYSKLTVDKSRWQQGNVFSCSVMHEALHNHYTQKSLSLSPGS

SEQ ID NO: 1698 - protein, 453 aa, synthetic construct
KRISNCVADYSVLYNSASFSTFKCYGVSPTKLNDLCFTNVYADSFVIRGDEVRQIAPGQTGKIADYNYKLPDDFTGCVIAWNSNNLDSKVGGNYNYLYRLFRKSNLKPFERDISTEIYQAGSTPCNGVEGFNCYFPLQSYGFQPTNGVGYQPYRVVVLSFELLHAPATVCGPKKSTNLVKNKCVNFNFNGLTGTGVLTESNKKFLPFQQFGRDGSGGGGDGGGGSGDKTHTCPPCPAPELLGGPSVFLFPPKPKDTLMISRTPEVTCVVVDVSHEDPEVKFNWYVDGVEVHNAKTKPREEQYNSTYRVVSVLTVLHQDWLNGKEYKCKVSNKALPAPIEKTISKAKGQPREPQVYTLPPSREELTKNQVSLTCLVKGFYPSDIAVEWESNGQPENNYKTTPPVLDSDGSFFLYSKLTVDKSRWQQGNVFSCSVMHEALHNHYTQKSLSLSPGS

SEQ ID NO: 1699 - protein, 452 aa, synthetic construct
RISNCVADYSVLYNSASFSTFKCYGVSPTKLNDLCFTNVYADSFVIRGDEVRQIAPGQTGKIADYNYKLPDDFTGCVIAWNSNNLDSKVGGNYNYLYRLFRKSNLKPFERDISTEIYQAGSTPCNGVEGFNCYFPLQSYGFQPTNGVGYQPYRVVVLSFELLHAPATVCGPKKSTNLVKNKCVNFNFNGLTGTGVLTESNKKFLPFQQFGRDGSGGGGDGGGGSGDKTHTCPPCPAPELLGGPSVFLFPPKPKDTLMISRTPEVTCVVVDVSHEDPEVKFNWYVDGVEVHNAKTKPREEQYNSTYRVVSVLTVLHQDWLNGKEYKCKVSNKALPAPIEKTISKAKGQPREPQVYTLPPSREELTKNQVSLTCLVKGFYPSDIAVEWESNGQPENNYKTTPPVLDSDGSFFLYSKLTVDKSRWQQGNVFSCSVMHEALHNHYTQKSLSLSPGS

SEQ ID NO: 1700 - protein, 451 aa, synthetic construct
ISNCVADYSVLYNSASFSTFKCYGVSPTKLNDLCFTNVYADSFVIRGDEVRQIAPGQTGKIADYNYKLPDDFTGCVIAWNSNNLDSKVGGNYNYLYRLFRKSNLKPFERDISTEIYQAGSTPCNGVEGFNCYFPLQSYGFQPTNGVGYQPYRVVVLSFELLHAPATVCGPKKSTNLVKNKCVNFNFNGLTGTGVLTESNKKFLPFQQFGRDGSGGGGDGGGGSGDKTHTCPPCPAPELLGGPSVFLFPPKPKDTLMISRTPEVTCVVVDVSHEDPEVKFNWYVDGVEVHNAKTKPREEQYNSTYRVVSVLTVLHQDWLNGKEYKCKVSNKALPAPIEKTISKAKGQPREPQVYTLPPSREELTKNQVSLTCLVKGFYPSDIAVEWESNGQPENNYKTTPPVLDSDGSFFLYSKLTVDKSRWQQGNVFSCSVMHEALHNHYTQKSLSLSPGS

SEQ ID NO: 1701 - protein, 450 aa, synthetic construct
SNCVADYSVLYNSASFSTFKCYGVSPTKLNDLCFTNVYADSFVIRGDEVRQIAPGQTGKIADYNYKLPDDFTGCVIAWNSNNLDSKVGGNYNYLYRLFRKSNLKPFERDISTEIYQAGSTPCNGVEGFNCYFPLQSYGFQPTNGVGYQPYRVVVLSFELLHAPATVCGPKKSTNLVKNKCVNFNFNGLTGTGVLTESNKKFLPFQQFGRDGSGGGGDGGGGSGDKTHTCPPCPAPELLGGPSVFLFPPKPKDTLMISRTPEVTCVVVDVSHEDPEVKFNWYVDGVEVHNAKTKPREEQYNSTYRVVSVLTVLHQDWLNGKEYKCKVSNKALPAPIEKTISKAKGQPREPQVYTLPPSREELTKNQVSLTCLVKGFYPSDIAVEWESNGQPENNYKTTPPVLDSDGSFFLYSKLTVDKSRWQQGNVFSCSVMHEALHNHYTQKSLSLSPGS

SEQ ID NO: 1702 - protein, 449 aa, synthetic construct
NCVADYSVLYNSASFSTFKCYGVSPTKLNDLCFTNVYADSFVIRGDEVRQIAPGQTGKIADYNYKLPDDFTGCVIAWNSNNLDSKVGGNYNYLYRLFRKSNLKPFERDISTEIYQAGSTPCNGVEGFNCYFPLQSYGFQPTNGVGYQPYRVVVLSFELLHAPATVCGPKKSTNLVKNKCVNFNFNGLTGTGVLTESNKKFLPFQQFGRDGSGGGGDGGGGSGDKTHTCPPCPAPELLGGPSVFLFPPKPKDTLMISRTPEVTCVVVDVSHEDPEVKFNWYVDGVEVHNAKTKPREEQYNSTYRVVSVLTVLHQDWLNGKEYKCKVSNKALPAPIEKTISKAKGQPREPQVYTLPPSREELTKNQVSLTCLVKGFYPSDIAVEWESNGQPENNYKTTPPVLDSDGSFFLYSKLTVDKSRWQQGNVFSCSVMHEALHNHYTQKSLSLSPGS

SEQ ID NO: 1703 - protein, 448 aa, synthetic construct
CVADYSVLYNSASFSTFKCYGVSPTKLNDLCFTNVYADSFVIRGDEVRQIAPGQTGKIADYNYKLPDDFTGCVIAWNSNNLDSKVGGNYNYLYRLFRKSNLKPFERDISTEIYQAGSTPCNGVEGFNCYFPLQSYGFQPTNGVGYQPYRVVVLSFELLHAPATVCGPKKSTNLVKNKCVNFNFNGLTGTGVLTESNKKFLPFQQFGRDGSGGGGDGGGGSGDKTHTCPPCPAPELLGGPSVFLFPPKPKDTLMISRTPEVTCVVVDVSHEDPEVKFNWYVDGVEVHNAKTKPREEQYNSTYRVVSVLTVLHQDWLNGKEYKCKVSNKALPAPIEKTISKAKGQPREPQVYTLPPSREELTKNQVSLTCLVKGFYPSDIAVEWESNGQPENNYKTTPPVLDSDGSFFLYSKLTVDKSRWQQGNVFSCSVMHEALHNHYTQKSLSLSPGS

SEQ ID NO: 1704 - protein, 447 aa, synthetic construct
VADYSVLYNSASFSTFKCYGVSPTKLNDLCFTNVYADSFVIRGDEVRQIAPGQTGKIADYNYKLPDDFTGCVIAWNSNNLDSKVGGNYNYLYRLFRKSNLKPFERDISTEIYQAGSTPCNGVEGFNCYFPLQSYGFQPTNGVGYQPYRVVVLSFELLHAPATVCGPKKSTNLVKNKCVNFNFNGLTGTGVLTESNKKFLPFQQFGRDGSGGGGDGGGGSGDKTHTCPPCPAPELLGGPSVFLFPPKPKDTLMISRTPEVTCVVVDVSHEDPEVKFNWYVDGVEVHNAKTKPREEQYNSTYRVVSVLTVLHQDWLNGKEYKCKVSNKALPAPIEKTISKAKGQPREPQVYTLPPSREELTKNQVSLTCLVKGFYPSDIAVEWESNGQPENNYKTTPPVLDSDGSFFLYSKLTVDKSRWQQGNVFSCSVMHEALHNHYTQKSLSLSPGS

SEQ ID NO: 1705 - protein, 446 aa, synthetic construct
ADYSVLYNSASFSTFKCYGVSPTKLNDLCFTNVYADSFVIRGDEVRQIAPGQTGKIADYNYKLPDDFTGCVIAWNSNNLDSKVGGNYNYLYRLFRKSNLKPFERDISTEIYQAGSTPCNGVEGFNCYFPLQSYGFQPTNGVGYQPYRVVVLSFELLHAPATVCGPKKSTNLVKNKCVNFNFNGLTGTGVLTESNKKFLPFQQFGRDGSGGGGDGGGGSGDKTHTCPPCPAPELLGGPSVFLFPPKPKDTLMISRTPEVTCVVVDVSHEDPEVKFNWYVDGVEVHNAKTKPREEQYNSTYRVVSVLTVLHQDWLNGKEYKCKVSNKALPAPIEKTISKAKGQPREPQVYTLPPSREELTKNQVSLTCLVKGFYPSDIAVEWESNGQPENNYKTTPPVLDSDGSFFLYSKLTVDKSRWQQGNVFSCSVMHEALHNHYTQKSLSLSPGS

SEQ ID NO: 1706 - protein, 445 aa, synthetic construct
DYSVLYNSASFSTFKCYGVSPTKLNDLCFTNVYADSFVIRGDEVRQIAPGQTGKIADYNYKLPDDFTGCVIAWNSNNLDSKVGGNYNYLYRLFRKSNLKPFERDISTEIYQAGSTPCNGVEGFNCYFPLQSYGFQPTNGVGYQPYRVVVLSFELLHAPATVCGPKKSTNLVKNKCVNFNFNGLTGTGVLTESNKKFLPFQQFGRDGSGGGGDGGGGSGDKTHTCPPCPAPELLGGPSVFLFPPKPKDTLMISRTPEVTCVVVDVSHEDPEVKFNWYVDGVEVHNAKTKPREEQYNSTYRVVSVLTVLHQDWLNGKEYKCKVSNKALPAPIEKTISKAKGQPREPQVYTLPPSREELTKNQVSLTCLVKGFYPSDIAVEWESNGQPENNYKTTPPVLDSDGSFFLYSKLTVDKSRWQQGNVFSCSVMHEALHNHYTQKSLSLSPGS

SEQ ID NO: 1707 - protein, 444 aa, synthetic construct
YSVLYNSASFSTFKCYGVSPTKLNDLCFTNVYADSFVIRGDEVRQIAPGQTGKIADYNYKLPDDFTGCVIAWNSNNLDSKVGGNYNYLYRLFRKSNLKPFERDISTEIYQAGSTPCNGVEGFNCYFPLQSYGFQPTNGVGYQPYRVVVLSFELLHAPATVCGPKKSTNLVKNKCVNFNFNGLTGTGVLTESNKKFLPFQQFGRDGSGGGGDGGGGSGDKTHTCPPCPAPELLGGPSVFLFPPKPKDTLMISRTPEVTCVVVDVSHEDPEVKFNWYVDGVEVHNAKTKPREEQYNSTYRVVSVLTVLHQDWLNGKEYKCKVSNKALPAPIEKTISKAKGQPREPQVYTLPPSREELTKNQVSLTCLVKGFYPSDIAVEWESNGQPENNYKTTPPVLDSDGSFFLYSKLTVDKSRWQQGNVFSCSVMHEALHNHYTQKSLSLSPGS

SEQ ID NO: 1708 - protein, 443 aa, synthetic construct
SVLYNSASFSTFKCYGVSPTKLNDLCFTNVYADSFVIRGDEVRQIAPGQTGKIADYNYKLPDDFTGCVIAWNSNNLDSKVGGNYNYLYRLFRKSNLKPFERDISTEIYQAGSTPCNGVEGFNCYFPLQSYGFQPTNGVGYQPYRVVVLSFELLHAPATVCGPKKSTNLVKNKCVNFNFNGLTGTGVLTESNKKFLPFQQFGRDGSGGGGDGGGGSGDKTHTCPPCPAPELLGGPSVFLFPPKPKDTLMISRTPEVTCVVVDVSHEDPEVKFNWYVDGVEVHNAKTKPREEQYNSTYRVVSVLTVLHQDWLNGKEYKCKVSNKALPAPIEKTISKAKGQPREPQVYTLPPSREELTKNQVSLTCLVKGFYPSDIAVEWESNGQPENNYKTTPPVLDSDGSFFLYSKLTVDKSRWQQGNVFSCSVMHEALHNHYTQKSLSLSPGS

SEQ ID NO: 1709 - protein, 489 aa, synthetic construct
RVQPTESIVRFPNITNLCPFGEVFNATRFASVYAWNRKRISNCVADYSVLYNSASFSTFKCYGVSPTKLNDLCFTNVYADSFVIRGDEVRQIAPGQTGKIADYNYKLPDDFTGCVIAWNSNNLDSKVGGNYNYLYRLFRKSNLKPFERDISTEIYQAGSTPCNGVEGFNCYFPLQSYGFQPTNGVGYQPYRVVVLSFELLHAPATVCGPKKSTNLVKNKCVNFNFNGLTGTGVLTESNKKFLPFQQFGRGSGGGGDGGGGSGDKTHTCPPCPAPELLGGPSVFLFPPKPKDTLMISRTPEVTCVVVDVSHEDPEVKFNWYVDGVEVHNAKTKPREEQYNSTYRVVSVLTVLHQDWLNGKEYKCKVSNKALPAPIEKTISKAKGQPREPQVYTLPPSREELTKNQVSLTCLVKGFYPSDIAVEWESNGQPENNYKTTPPVLDSDGSFFLYSKLTVDKSRWQQGNVFSCSVMHEALHNHYTQKSLSLSPGS

SEQ ID NO: 1710 - protein, 488 aa, synthetic construct
RVQPTESIVRFPNITNLCPFGEVFNATRFASVYAWNRKRISNCVADYSVLYNSASFSTFKCYGVSPTKLNDLCFTNVYADSFVIRGDEVRQIAPGQTGKIADYNYKLPDDFTGCVIAWNSNNLDSKVGGNYNYLYRLFRKSNLKPFERDISTEIYQAGSTPCNGVEGFNCYFPLQSYGFQPTNGVGYQPYRVVVLSFELLHAPATVCGPKKSTNLVKNKCVNFNFNGLTGTGVLTESNKKFLPFQQFGGSGGGGDGGGGSGDKTHTCPPCPAPELLGGPSVFLFPPKPKDTLMISRTPEVTCVVVDVSHEDPEVKFNWYVDGVEVHNAKTKPREEQYNSTYRVVSVLTVLHQDWLNGKEYKCKVSNKALPAPIEKTISKAKGQPREPQVYTLPPSREELTKNQVSLTCLVKGFYPSDIAVEWESNGQPENNYKTTPPVLDSDGSFFLYSKLTVDKSRWQQGNVFSCSVMHEALHNHYTQKSLSLSPGS

SEQ ID NO: 1711 - protein, 487 aa, synthetic construct
RVQPTESIVRFPNITNLCPFGEVFNATRFASVYAWNRKRISNCVADYSVLYNSASFSTFKCYGVSPTKLNDLCFTNVYADSFVIRGDEVRQIAPGQTGKIADYNYKLPDDFTGCVIAWNSNNLDSKVGGNYNYLYRLFRKSNLKPFERDISTEIYQAGSTPCNGVEGFNCYFPLQSYGFQPTNGVGYQPYRVVVLSFELLHAPATVCGPKKSTNLVKNKCVNFNFNGLTGTGVLTESNKKFLPFQQFGSGGGGDGGGGSGDKTHTCPPCPAPELLGGPSVFLFPPKPKDTLMISRTPEVTCVVVDVSHEDPEVKFNWYVDGVEVHNAKTKPREEQYNSTYRVVSVLTVLHQDWLNGKEYKCKVSNKALPAPIEKTISKAKGQPREPQVYTLPPSREELTKNQVSLTCLVKGFYPSDIAVEWESNGQPENNYKTTPPVLDSDGSFFLYSKLTVDKSRWQQGNVFSCSVMHEALHNHYTQKSLSLSPGS

SEQ ID NO: 1712 - protein, 486 aa, synthetic construct
RVQPTESIVRFPNITNLCPFGEVFNATRFASVYAWNRKRISNCVADYSVLYNSASFSTFKCYGVSPTKLNDLCFTNVYADSFVIRGDEVRQIAPGQTGKIADYNYKLPDDFTGCVIAWNSNNLDSKVGGNYNYLYRLFRKSNLKPFERDISTEIYQAGSTPCNGVEGFNCYFPLQSYGFQPTNGVGYQPYRVVVLSFELLHAPATVCGPKKSTNLVKNKCVNFNFNGLTGTGVLTESNKKFLPFQQGSGGGGDGGGGSGDKTHTCPPCPAPELLGGPSVFLFPPKPKDTLMISRTPEVTCVVVDVSHEDPEVKFNWYVDGVEVHNAKTKPREEQYNSTYRVVSVLTVLHQDWLNGKEYKCKVSNKALPAPIEKTISKAKGQPREPQVYTLPPSREELTKNQVSLTCLVKGFYPSDIAVEWESNGQPENNYKTTPPVLDSDGSFFLYSKLTVDKSRWQQGNVFSCSVMHEALHNHYTQKSLSLSPGS

SEQ ID NO: 1713 - protein, 485 aa, synthetic construct
RVQPTESIVRFPNITNLCPFGEVFNATRFASVYAWNRKRISNCVADYSVLYNSASFSTFKCYGVSPTKLNDLCFTNVYADSFVIRGDEVRQIAPGQTGKIADYNYKLPDDFTGCVIAWNSNNLDSKVGGNYNYLYRLFRKSNLKPFERDISTEIYQAGSTPCNGVEGFNCYFPLQSYGFQPTNGVGYQPYRVVVLSFELLHAPATVCGPKKSTNLVKNKCVNFNFNGLTGTGVLTESNKKFLPFQGSGGGGDGGGGSGDKTHTCPPCPAPELLGGPSVFLFPPKPKDTLMISRTPEVTCVVVDVSHEDPEVKFNWYVDGVEVHNAKTKPREEQYNSTYRVVSVLTVLHQDWLNGKEYKCKVSNKALPAPIEKTISKAKGQPREPQVYTLPPSREELTKNQVSLTCLVKGFYPSDIAVEWESNGQPENNYKTTPPVLDSDGSFFLYSKLTVDKSRWQQGNVFSCSVMHEALHNHYTQKSLSLSPGS

SEQ ID NO: 1714 - protein, 484 aa, synthetic construct
RVQPTESIVRFPNITNLCPFGEVFNATRFASVYAWNRKRISNCVADYSVLYNSASFSTFKCYGVSPTKLNDLCFTNVYADSFVIRGDEVRQIAPGQTGKIADYNYKLPDDFTGCVIAWNSNNLDSKVGGNYNYLYRLFRKSNLKPFERDISTEIYQAGSTPCNGVEGFNCYFPLQSYGFQPTNGVGYQPYRVVVLSFELLHAPATVCGPKKSTNLVKNKCVNFNFNGLTGTGVLTESNKKFLPFGSGGGGDGGGGSGDKTHTCPPCPAPELLGGPSVFLFPPKPKDTLMISRTPEVTCVVVDVSHEDPEVKFNWYVDGVEVHNAKTKPREEQYNSTYRVVSVLTVLHQDWLNGKEYKCKVSNKALPAPIEKTISKAKGQPREPQVYTLPPSREELTKNQVSLTCLVKGFYPSDIAVEWESNGQPENNYKTTPPVLDSDGSFFLYSKLTVDKSRWQQGNVFSCSVMHEALHNHYTQKSLSLSPGS

SEQ ID NO: 1715 - protein, 483 aa, synthetic construct
RVQPTESIVRFPNITNLCPFGEVFNATRFASVYAWNRKRISNCVADYSVLYNSASFSTFKCYGVSPTKLNDLCFTNVYADSFVIRGDEVRQIAPGQTGKIADYNYKLPDDFTGCVIAWNSNNLDSKVGGNYNYLYRLFRKSNLKPFERDISTEIYQAGSTPCNGVEGFNCYFPLQSYGFQPTNGVGYQPYRVVVLSFELLHAPATVCGPKKSTNLVKNKCVNFNFNGLTGTGVLTESNKKFLPGSGGGGDGGGGSGDKTHTCPPCPAPELLGGPSVFLFPPKPKDTLMISRTPEVTCVVVDVSHEDPEVKFNWYVDGVEVHNAKTKPREEQYNSTYRVVSVLTVLHQDWLNGKEYKCKVSNKALPAPIEKTISKAKGQPREPQVYTLPPSREELTKNQVSLTCLVKGFYPSDIAVEWESNGQPENNYKTTPPVLDSDGSFFLYSKLTVDKSRWQQGNVFSCSVMHEALHNHYTQKSLSLSPGS

SEQ ID NO: 1716 - protein, 482 aa, synthetic construct
RVQPTESIVRFPNITNLCPFGEVFNATRFASVYAWNRKRISNCVADYSVLYNSASFSTFKCYGVSPTKLNDLCFTNVYADSFVIRGDEVRQIAPGQTGKIADYNYKLPDDFTGCVIAWNSNNLDSKVGGNYNYLYRLFRKSNLKPFERDISTEIYQAGSTPCNGVEGFNCYFPLQSYGFQPTNGVGYQPYRVVVLSFELLHAPATVCGPKKSTNLVKNKCVNFNFNGLTGTGVLTESNKKFLGSGGGGDGGGGSGDKTHTCPPCPAPELLGGPSVFLFPPKPKDTLMISRTPEVTCVVVDVSHEDPEVKFNWYVDGVEVHNAKTKPREEQYNSTYRVVSVLTVLHQDWLNGKEYKCKVSNKALPAPIEKTISKAKGQPREPQVYTLPPSREELTKNQVSLTCLVKGFYPSDIAVEWESNGQPENNYKTTPPVLDSDGSFFLYSKLTVDKSRWQQGNVFSCSVMHEALHNHYTQKSLSLSPGS

SEQ ID NO: 1717 - protein, 481 aa, synthetic construct
RVQPTESIVRFPNITNLCPFGEVFNATRFASVYAWNRKRISNCVADYSVLYNSASFSTFKCYGVSPTKLNDLCFTNVYADSFVIRGDEVRQIAPGQTGKIADYNYKLPDDFTGCVIAWNSNNLDSKVGGNYNYLYRLFRKSNLKPFERDISTEIYQAGSTPCNGVEGFNCYFPLQSYGFQPTNGVGYQPYRVVVLSFELLHAPATVCGPKKSTNLVKNKCVNFNFNGLTGTGVLTESNKKFGSGGGGDGGGGSGDKTHTCPPCPAPELLGGPSVFLFPPKPKDTLMISRTPEVTCVVVDVSHEDPEVKFNWYVDGVEVHNAKTKPREEQYNSTYRVVSVLTVLHQDWLNGKEYKCKVSNKALPAPIEKTISKAKGQPREPQVYTLPPSREELTKNQVSLTCLVKGFYPSDIAVEWESNGQPENNYKTTPPVLDSDGSFFLYSKLTVDKSRWQQGNVFSCSVMHEALHNHYTQKSLSLSPGS

SEQ ID NO: 1718 - protein, 480 aa, synthetic construct
RVQPTESIVRFPNITNLCPFGEVFNATRFASVYAWNRKRISNCVADYSVLYNSASFSTFKCYGVSPTKLNDLCFTNVYADSFVIRGDEVRQIAPGQTGKIADYNYKLPDDFTGCVIAWNSNNLDSKVGGNYNYLYRLFRKSNLKPFERDISTEIYQAGSTPCNGVEGFNCYFPLQSYGFQPTNGVGYQPYRVVVLSFELLHAPATVCGPKKSTNLVKNKCVNFNFNGLTGTGVLTESNKKGSGGGGDGGGGSGDKTHTCPPCPAPELLGGPSVFLFPPKPKDTLMISRTPEVTCVVVDVSHEDPEVKFNWYVDGVEVHNAKTKPREEQYNSTYRVVSVLTVLHQDWLNGKEYKCKVSNKALPAPIEKTISKAKGQPREPQVYTLPPSREELTKNQVSLTCLVKGFYPSDIAVEWESNGQPENNYKTTPPVLDSDGSFFLYSKLTVDKSRWQQGNVFSCSVMHEALHNHYTQKSLSLSPGS

SEQ ID NO: 1719 - protein, 479 aa, synthetic construct
RVQPTESIVRFPNITNLCPFGEVFNATRFASVYAWNRKRISNCVADYSVLYNSASFSTFKCYGVSPTKLNDLCFTNVYADSFVIRGDEVRQIAPGQTGKIADYNYKLPDDFTGCVIAWNSNNLDSKVGGNYNYLYRLFRKSNLKPFERDISTEIYQAGSTPCNGVEGFNCYFPLQSYGFQPTNGVGYQPYRVVVLSFELLHAPATVCGPKKSTNLVKNKCVNFNFNGLTGTGVLTESNKGSGGGGDGGGGSGDKTHTCPPCPAPELLGGPSVFLFPPKPKDTLMISRTPEVTCVVVDVSHEDPEVKFNWYVDGVEVHNAKTKPREEQYNSTYRVVSVLTVLHQDWLNGKEYKCKVSNKALPAPIEKTISKAKGQPREPQVYTLPPSREELTKNQVSLTCLVKGFYPSDIAVEWESNGQPENNYKTTPPVLDSDGSFFLYSKLTVDKSRWQQGNVFSCSVMHEALHNHYTQKSLSLSPGS

SEQ ID NO: 1720 - protein, 478 aa, synthetic construct
RVQPTESIVRFPNITNLCPFGEVFNATRFASVYAWNRKRISNCVADYSVLYNSASFSTFKCYGVSPTKLNDLCFTNVYADSFVIRGDEVRQIAPGQTGKIADYNYKLPDDFTGCVIAWNSNNLDSKVGGNYNYLYRLFRKSNLKPFERDISTEIYQAGSTPCNGVEGFNCYFPLQSYGFQPTNGVGYQPYRVVVLSFELLHAPATVCGPKKSTNLVKNKCVNFNFNGLTGTGVLTESNGSGGGGDGGGGSGDKTHTCPPCPAPELLGGPSVFLFPPKPKDTLMISRTPEVTCVVVDVSHEDPEVKFNWYVDGVEVHNAKTKPREEQYNSTYRVVSVLTVLHQDWLNGKEYKCKVSNKALPAPIEKTISKAKGQPREPQVYTLPPSREELTKNQVSLTCLVKGFYPSDIAVEWESNGQPENNYKTTPPVLDSDGSFFLYSKLTVDKSRWQQGNVFSCSVMHEALHNHYTQKSLSLSPGS

SEQ ID NO: 1721 - protein, 477 aa, synthetic construct; identical to SEQ ID NO: 129

SEQ ID NO: 1722 - protein, 476 aa, synthetic construct
RVQPTESIVRFPNITNLCPFGEVFNATRFASVYAWNRKRISNCVADYSVLYNSASFSTFKCYGVSPTKLNDLCFTNVYADSFVIRGDEVRQIAPGQTGKIADYNYKLPDDFTGCVIAWNSNNLDSKVGGNYNYLYRLFRKSNLKPFERDISTEIYQAGSTPCNGVEGFNCYFPLQSYGFQPTNGVGYQPYRVVVLSFELLHAPATVCGPKKSTNLVKNKCVNFNFNGLTGTGVLTEGSGGGGDGGGGSGDKTHTCPPCPAPELLGGPSVFLFPPKPKDTLMISRTPEVTCVVVDVSHEDPEVKFNWYVDGVEVHNAKTKPREEQYNSTYRVVSVLTVLHQDWLNGKEYKCKVSNKALPAPIEKTISKAKGQPREPQVYTLPPSREELTKNQVSLTCLVKGFYPSDIAVEWESNGQPENNYKTTPPVLDSDGSFFLYSKLTVDKSRWQQGNVFSCSVMHEALHNHYTQKSLSLSPGS

SEQ ID NO: 1723 - protein, 475 aa, synthetic construct
RVQPTESIVRFPNITNLCPFGEVFNATRFASVYAWNRKRISNCVADYSVLYNSASFSTFKCYGVSPTKLNDLCFTNVYADSFVIRGDEVRQIAPGQTGKIADYNYKLPDDFTGCVIAWNSNNLDSKVGGNYNYLYRLFRKSNLKPFERDISTEIYQAGSTPCNGVEGFNCYFPLQSYGFQPTNGVGYQPYRVVVLSFELLHAPATVCGPKKSTNLVKNKCVNFNFNGLTGTGVLTGSGGGGDGGGGSGDKTHTCPPCPAPELLGGPSVFLFPPKPKDTLMISRTPEVTCVVVDVSHEDPEVKFNWYVDGVEVHNAKTKPREEQYNSTYRVVSVLTVLHQDWLNGKEYKCKVSNKALPAPIEKTISKAKGQPREPQVYTLPPSREELTKNQVSLTCLVKGFYPSDIAVEWESNGQPENNYKTTPPVLDSDGSFFLYSKLTVDKSRWQQGNVFSCSVMHEALHNHYTQKSLSLSPGS

SEQ ID NO: 1724 - protein, 474 aa, synthetic construct
RVQPTESIVRFPNITNLCPFGEVFNATRFASVYAWNRKRISNCVADYSVLYNSASFSTFKCYGVSPTKLNDLCFTNVYADSFVIRGDEVRQIAPGQTGKIADYNYKLPDDFTGCVIAWNSNNLDSKVGGNYNYLYRLFRKSNLKPFERDISTEIYQAGSTPCNGVEGFNCYFPLQSYGFQPTNGVGYQPYRVVVLSFELLHAPATVCGPKKSTNLVKNKCVNFNFNGLTGTGVLGSGGGGDGGGGSGDKTHTCPPCPAPELLGGPSVFLFPPKPKDTLMISRTPEVTCVVVDVSHEDPEVKFNWYVDGVEVHNAKTKPREEQYNSTYRVVSVLTVLHQDWLNGKEYKCKVSNKALPAPIEKTISKAKGQPREPQVYTLPPSREELTKNQVSLTCLVKGFYPSDIAVEWESNGQPENNYKTTPPVLDSDGSFFLYSKLTVDKSRWQQGNVFSCSVMHEALHNHYTQKSLSLSPGS

SEQ ID NO: 1725 - protein, 473 aa, synthetic construct
RVQPTESIVRFPNITNLCPFGEVFNATRFASVYAWNRKRISNCVADYSVLYNSASFSTFKCYGVSPTKLNDLCFTNVYADSFVIRGDEVRQIAPGQTGKIADYNYKLPDDFTGCVIAWNSNNLDSKVGGNYNYLYRLFRKSNLKPFERDISTEIYQAGSTPCNGVEGFNCYFPLQSYGFQPTNGVGYQPYRVVVLSFELLHAPATVCGPKKSTNLVKNKCVNFNFNGLTGTGVGSGGGGDGGGGSGDKTHTCPPCPAPELLGGPSVFLFPPKPKDTLMISRTPEVTCVVVDVSHEDPEVKFNWYVDGVEVHNAKTKPREEQYNSTYRVVSVLTVLHQDWLNGKEYKCKVSNKALPAPIEKTISKAKGQPREPQVYTLPPSREELTKNQVSLTCLVKGFYPSDIAVEWESNGQPENNYKTTPPVLDSDGSFFLYSKLTVDKSRWQQGNVFSCSVMHEALHNHYTQKSLSLSPGS

SEQ ID NO: 1726 - protein, 472 aa, synthetic construct
RVQPTESIVRFPNITNLCPFGEVFNATRFASVYAWNRKRISNCVADYSVLYNSASFSTFKCYGVSPTKLNDLCFTNVYADSFVIRGDEVRQIAPGQTGKIADYNYKLPDDFTGCVIAWNSNNLDSKVGGNYNYLYRLFRKSNLKPFERDISTEIYQAGSTPCNGVEGFNCYFPLQSYGFQPTNGVGYQPYRVVVLSFELLHAPATVCGPKKSTNLVKNKCVNFNFNGLTGTGGSGGGGDGGGGSGDKTHTCPPCPAPELLGGPSVFLFPPKPKDTLMISRTPEVTCVVVDVSHEDPEVKFNWYVDGVEVHNAKTKPREEQYNSTYRVVSVLTVLHQDWLNGKEYKCKVSNKALPAPIEKTISKAKGQPREPQVYTLPPSREELTKNQVSLTCLVKGFYPSDIAVEWESNGQPENNYKTTPPVLDSDGSFFLYSKLTVDKSRWQQGNVFSCSVMHEALHNHYTQKSLSLSPGS

SEQ ID NO: 1727 - protein, 471 aa, synthetic construct
RVQPTESIVRFPNITNLCPFGEVFNATRFASVYAWNRKRISNCVADYSVLYNSASFSTFKCYGVSPTKLNDLCFTNVYADSFVIRGDEVRQIAPGQTGKIADYNYKLPDDFTGCVIAWNSNNLDSKVGGNYNYLYRLFRKSNLKPFERDISTEIYQAGSTPCNGVEGFNCYFPLQSYGFQPTNGVGYQPYRVVVLSFELLHAPATVCGPKKSTNLVKNKCVNFNFNGLTGTGSGGGGDGGGGSGDKTHTCPPCPAPELLGGPSVFLFPPKPKDTLMISRTPEVTCVVVDVSHEDPEVKFNWYVDGVEVHNAKTKPREEQYNSTYRVVSVLTVLHQDWLNGKEYKCKVSNKALPAPIEKTISKAKGQPREPQVYTLPPSREELTKNQVSLTCLVKGFYPSDIAVEWESNGQPENNYKTTPPVLDSDGSFFLYSKLTVDKSRWQQGNVFSCSVMHEALHNHYTQKSLSLSPGS

SEQ ID NO: 1728 - protein, 470 aa, synthetic construct
RVQPTESIVRFPNITNLCPFGEVFNATRFASVYAWNRKRISNCVADYSVLYNSASFSTFKCYGVSPTKLNDLCFTNVYADSFVIRGDEVRQIAPGQTGKIADYNYKLPDDFTGCVIAWNSNNLDSKVGGNYNYLYRLFRKSNLKPFERDISTEIYQAGSTPCNGVEGFNCYFPLQSYGFQPTNGVGYQPYRVVVLSFELLHAPATVCGPKKSTNLVKNKCVNFNFNGLTGGSGGGGDGGGGSGDKTHTCPPCPAPELLGGPSVFLFPPKPKDTLMISRTPEVTCVVVDVSHEDPEVKFNWYVDGVEVHNAKTKPREEQYNSTYRVVSVLTVLHQDWLNGKEYKCKVSNKALPAPIEKTISKAKGQPREPQVYTLPPSREELTKNQVSLTCLVKGFYPSDIAVEWESNGQPENNYKTTPPVLDSDGSFFLYSKLTVDKSRWQQGNVFSCSVMHEALHNHYTQKSLSLSPGS

SEQ ID NO: 1729 - protein, 469 aa, synthetic construct
RVQPTESIVRFPNITNLCPFGEVFNATRFASVYAWNRKRISNCVADYSVLYNSASFSTFKCYGVSPTKLNDLCFTNVYADSFVIRGDEVRQIAPGQTGKIADYNYKLPDDFTGCVIAWNSNNLDSKVGGNYNYLYRLFRKSNLKPFERDISTEIYQAGSTPCNGVEGFNCYFPLQSYGFQPTNGVGYQPYRVVVLSFELLHAPATVCGPKKSTNLVKNKCVNFNFNGLTGSGGGGDGGGGSGDKTHTCPPCPAPELLGGPSVFLFPPKPKDTLMISRTPEVTCVVVDVSHEDPEVKFNWYVDGVEVHNAKTKPREEQYNSTYRVVSVLTVLHQDWLNGKEYKCKVSNKALPAPIEKTISKAKGQPREPQVYTLPPSREELTKNQVSLTCLVKGFYPSDIAVEWESNGQPENNYKTTPPVLDSDGSFFLYSKLTVDKSRWQQGNVFSCSVMHEALHNHYTQKSLSLSPGS

SEQ ID NO: 1730 - protein, 468 aa, synthetic construct
RVQPTESIVRFPNITNLCPFGEVFNATRFASVYAWNRKRISNCVADYSVLYNSASFSTFKCYGVSPTKLNDLCFTNVYADSFVIRGDEVRQIAPGQTGKIADYNYKLPDDFTGCVIAWNSNNLDSKVGGNYNYLYRLFRKSNLKPFERDISTEIYQAGSTPCNGVEGFNCYFPLQSYGFQPTNGVGYQPYRVVVLSFELLHAPATVCGPKKSTNLVKNKCVNFNFNGLGSGGGGDGGGGSGDKTHTCPPCPAPELLGGPSVFLFPPKPKDTLMISRTPEVTCVVVDVSHEDPEVKFNWYVDGVEVHNAKTKPREEQYNSTYRVVSVLTVLHQDWLNGKEYKCKVSNKALPAPIEKTISKAKGQPREPQVYTLPPSREELTKNQVSLTCLVKGFYPSDIAVEWESNGQPENNYKTTPPVLDSDGSFFLYSKLTVDKSRWQQGNVFSCSVMHEALHNHYTQKSLSLSPGS

SEQ ID NO: 1731 - protein, 467 aa, synthetic construct
RVQPTESIVRFPNITNLCPFGEVFNATRFASVYAWNRKRISNCVADYSVLYNSASFSTFKCYGVSPTKLNDLCFTNVYADSFVIRGDEVRQIAPGQTGKIADYNYKLPDDFTGCVIAWNSNNLDSKVGGNYNYLYRLFRKSNLKPFERDISTEIYQAGSTPCNGVEGFNCYFPLQSYGFQPTNGVGYQPYRVVVLSFELLHAPATVCGPKKSTNLVKNKCVNFNFNGGSGGGGDGGGGSGDKTHTCPPCPAPELLGGPSVFLFPPKPKDTLMISRTPEVTCVVVDVSHEDPEVKFNWYVDGVEVHNAKTKPREEQYNSTYRVVSVLTVLHQDWLNGKEYKCKVSNKALPAPIEKTISKAKGQPREPQVYTLPPSREELTKNQVSLTCLVKGFYPSDIAVEWESNGQPENNYKTTPPVLDSDGSFFLYSKLTVDKSRWQQGNVFSCSVMHEALHNHYTQKSLSLSPGS

SEQ ID NO: 1732 - protein, 466 aa, synthetic construct
RVQPTESIVRFPNITNLCPFGEVFNATRFASVYAWNRKRISNCVADYSVLYNSASFSTFKCYGVSPTKLNDLCFTNVYADSFVIRGDEVRQIAPGQTGKIADYNYKLPDDFTGCVIAWNSNNLDSKVGGNYNYLYRLFRKSNLKPFERDISTEIYQAGSTPCNGVEGFNCYFPLQSYGFQPTNGVGYQPYRVVVLSFELLHAPATVCGPKKSTNLVKNKCVNFNFNGSGGGGDGGGGSGDKTHTCPPCPAPELLGGPSVFLFPPKPKDTLMISRTPEVTCVVVDVSHEDPEVKFNWYVDGVEVHNAKTKPREEQYNSTYRVVSVLTVLHQDWLNGKEYKCKVSNKALPAPIEKTISKAKGQPREPQVYTLPPSREELTKNQVSLTCLVKGFYPSDIAVEWESNGQPENNYKTTPPVLDSDGSFFLYSKLTVDKSRWQQGNVFSCSVMHEALHNHYTQKSLSLSPGS

SEQ ID NO: 1733 - protein, 465 aa, synthetic construct
RVQPTESIVRFPNITNLCPFGEVFNATRFASVYAWNRKRISNCVADYSVLYNSASFSTFKCYGVSPTKLNDLCFTNVYADSFVIRGDEVRQIAPGQTGKIADYNYKLPDDFTGCVIAWNSNNLDSKVGGNYNYLYRLFRKSNLKPFERDISTEIYQAGSTPCNGVEGFNCYFPLQSYGFQPTNGVGYQPYRVVVLSFELLHAPATVCGPKKSTNLVKNKCVNFNFGSGGGGDGGGGSGDKTHTCPPCPAPELLGGPSVFLFPPKPKDTLMISRTPEVTCVVVDVSHEDPEVKFNWYVDGVEVHNAKTKPREEQYNSTYRVVSVLTVLHQDWLNGKEYKCKVSNKALPAPIEKTISKAKGQPREPQVYTLPPSREELTKNQVSLTCLVKGFYPSDIAVEWESNGQPENNYKTTPPVLDSDGSFFLYSKLTVDKSRWQQGNVFSCSVMHEALHNHYTQKSLSLSPGS

SEQ ID NO: 1734 - protein, 464 aa, synthetic construct
RVQPTESIVRFPNITNLCPFGEVFNATRFASVYAWNRKRISNCVADYSVLYNSASFSTFKCYGVSPTKLNDLCFTNVYADSFVIRGDEVRQIAPGQTGKIADYNYKLPDDFTGCVIAWNSNNLDSKVGGNYNYLYRLFRKSNLKPFERDISTEIYQAGSTPCNGVEGFNCYFPLQSYGFQPTNGVGYQPYRVVVLSFELLHAPATVCGPKKSTNLVKNKCVNFNGSGGGGDGGGGSGDKTHTCPPCPAPELLGGPSVFLFPPKPKDTLMISRTPEVTCVVVDVSHEDPEVKFNWYVDGVEVHNAKTKPREEQYNSTYRVVSVLTVLHQDWLNGKEYKCKVSNKALPAPIEKTISKAKGQPREPQVYTLPPSREELTKNQVSLTCLVKGFYPSDIAVEWESNGQPENNYKTTPPVLDSDGSFFLYSKLTVDKSRWQQGNVFSCSVMHEALHNHYTQKSLSLSPGS

SEQ ID NO: 1735 - protein, 463 aa, synthetic construct
RVQPTESIVRFPNITNLCPFGEVFNATRFASVYAWNRKRISNCVADYSVLYNSASFSTFKCYGVSPTKLNDLCFTNVYADSFVIRGDEVRQIAPGQTGKIADYNYKLPDDFTGCVIAWNSNNLDSKVGGNYNYLYRLFRKSNLKPFERDISTEIYQAGSTPCNGVEGFNCYFPLQSYGFQPTNGVGYQPYRVVVLSFELLHAPATVCGPKKSTNLVKNKCVNFGSGGGGDGGGGSGDKTHTCPPCPAPELLGGPSVFLFPPKPKDTLMISRTPEVTCVVVDVSHEDPEVKFNWYVDGVEVHNAKTKPREEQYNSTYRVVSVLTVLHQDWLNGKEYKCKVSNKALPAPIEKTISKAKGQPREPQVYTLPPSREELTKNQVSLTCLVKGFYPSDIAVEWESNGQPENNYKTTPPVLDSDGSFFLYSKLTVDKSRWQQGNVFSCSVMHEALHNHYTQKSLSLSPGS

SEQ ID NO: 1736 - protein, 462 aa, synthetic construct
RVQPTESIVRFPNITNLCPFGEVFNATRFASVYAWNRKRISNCVADYSVLYNSASFSTFKCYGVSPTKLNDLCFTNVYADSFVIRGDEVRQIAPGQTGKIADYNYKLPDDFTGCVIAWNSNNLDSKVGGNYNYLYRLFRKSNLKPFERDISTEIYQAGSTPCNGVEGFNCYFPLQSYGFQPTNGVGYQPYRVVVLSFELLHAPATVCGPKKSTNLVKNKCVNGSGGGGDGGGGSGDKTHTCPPCPAPELLGGPSVFLFPPKPKDTLMISRTPEVTCVVVDVSHEDPEVKFNWYVDGVEVHNAKTKPREEQYNSTYRVVSVLTVLHQDWLNGKEYKCKVSNKALPAPIEKTISKAKGQPREPQVYTLPPSREELTKNQVSLTCLVKGFYPSDIAVEWESNGQPENNYKTTPPVLDSDGSFFLYSKLTVDKSRWQQGNVFSCSVMHEALHNHYTQKSLSLSPGS

SEQ ID NO: 1737 - protein, 461 aa, synthetic construct
RVQPTESIVRFPNITNLCPFGEVFNATRFASVYAWNRKRISNCVADYSVLYNSASFSTFKCYGVSPTKLNDLCFTNVYADSFVIRGDEVRQIAPGQTGKIADYNYKLPDDFTGCVIAWNSNNLDSKVGGNYNYLYRLFRKSNLKPFERDISTEIYQAGSTPCNGVEGFNCYFPLQSYGFQPTNGVGYQPYRVVVLSFELLHAPATVCGPKKSTNLVKNKCVGSGGGGDGGGGSGDKTHTCPPCPAPELLGGPSVFLFPPKPKDTLMISRTPEVTCVVVDVSHEDPEVKFNWYVDGVEVHNAKTKPREEQYNSTYRVVSVLTVLHQDWLNGKEYKCKVSNKALPAPIEKTISKAKGQPREPQVYTLPPSREELTKNQVSLTCLVKGFYPSDIAVEWESNGQPENNYKTTPPVLDSDGSFFLYSKLTVDKSRWQQGNVFSCSVMHEALHNHYTQKSLSLSPGS

SEQ ID NO: 1738 - protein, 460 aa, synthetic construct
RVQPTESIVRFPNITNLCPFGEVFNATRFASVYAWNRKRISNCVADYSVLYNSASFSTFKCYGVSPTKLNDLCFTNVYADSFVIRGDEVRQIAPGQTGKIADYNYKLPDDFTGCVIAWNSNNLDSKVGGNYNYLYRLFRKSNLKPFERDISTEIYQAGSTPCNGVEGFNCYFPLQSYGFQPTNGVGYQPYRVVVLSFELLHAPATVCGPKKSTNLVKNKCGSGGGGDGGGGSGDKTHTCPPCPAPELLGGPSVFLFPPKPKDTLMISRTPEVTCVVVDVSHEDPEVKFNWYVDGVEVHNAKTKPREEQYNSTYRVVSVLTVLHQDWLNGKEYKCKVSNKALPAPIEKTISKAKGQPREPQVYTLPPSREELTKNQVSLTCLVKGFYPSDIAVEWESNGQPENNYKTTPPVLDSDGSFFLYSKLTVDKSRWQQGNVFSCSVMHEALHNHYTQKSLSLSPGS

SEQ ID NO: 1739 - protein, 459 aa, synthetic construct
RVQPTESIVRFPNITNLCPFGEVFNATRFASVYAWNRKRISNCVADYSVLYNSASFSTFKCYGVSPTKLNDLCFTNVYADSFVIRGDEVRQIAPGQTGKIADYNYKLPDDFTGCVIAWNSNNLDSKVGGNYNYLYRLFRKSNLKPFERDISTEIYQAGSTPCNGVEGFNCYFPLQSYGFQPTNGVGYQPYRVVVLSFELLHAPATVCGPKKSTNLVKNKGSGGGGDGGGGSGDKTHTCPPCPAPELLGGPSVFLFPPKPKDTLMISRTPEVTCVVVDVSHEDPEVKFNWYVDGVEVHNAKTKPREEQYNSTYRVVSVLTVLHQDWLNGKEYKCKVSNKALPAPIEKTISKAKGQPREPQVYTLPPSREELTKNQVSLTCLVKGFYPSDIAVEWESNGQPENNYKTTPPVLDSDGSFFLYSKLTVDKSRWQQGNVFSCSVMHEALHNHYTQKSLSLSPGS

SEQ ID NO: 1740 - protein, 458 aa, synthetic construct
RVQPTESIVRFPNITNLCPFGEVFNATRFASVYAWNRKRISNCVADYSVLYNSASFSTFKCYGVSPTKLNDLCFTNVYADSFVIRGDEVRQIAPGQTGKIADYNYKLPDDFTGCVIAWNSNNLDSKVGGNYNYLYRLFRKSNLKPFERDISTEIYQAGSTPCNGVEGFNCYFPLQSYGFQPTNGVGYQPYRVVVLSFELLHAPATVCGPKKSTNLVKNGSGGGGDGGGGSGDKTHTCPPCPAPELLGGPSVFLFPPKPKDTLMISRTPEVTCVVVDVSHEDPEVKFNWYVDGVEVHNAKTKPREEQYNSTYRVVSVLTVLHQDWLNGKEYKCKVSNKALPAPIEKTISKAKGQPREPQVYTLPPSREELTKNQVSLTCLVKGFYPSDIAVEWESNGQPENNYKTTPPVLDSDGSFFLYSKLTVDKSRWQQGNVFSCSVMHEALHNHYTQKSLSLSPGS

SEQ ID NO: 1741 - protein, 457 aa, synthetic construct
RVQPTESIVRFPNITNLCPFGEVFNATRFASVYAWNRKRISNCVADYSVLYNSASFSTFKCYGVSPTKLNDLCFTNVYADSFVIRGDEVRQIAPGQTGKIADYNYKLPDDFTGCVIAWNSNNLDSKVGGNYNYLYRLFRKSNLKPFERDISTEIYQAGSTPCNGVEGFNCYFPLQSYGFQPTNGVGYQPYRVVVLSFELLHAPATVCGPKKSTNLVKGSGGGGDGGGGSGDKTHTCPPCPAPELLGGPSVFLFPPKPKDTLMISRTPEVTCVVVDVSHEDPEVKFNWYVDGVEVHNAKTKPREEQYNSTYRVVSVLTVLHQDWLNGKEYKCKVSNKALPAPIEKTISKAKGQPREPQVYTLPPSREELTKNQVSLTCLVKGFYPSDIAVEWESNGQPENNYKTTPPVLDSDGSFFLYSKLTVDKSRWQQGNVFSCSVMHEALHNHYTQKSLSLSPGS

SEQ ID NO: 1742 - protein, 456 aa, synthetic construct
RVQPTESIVRFPNITNLCPFGEVFNATRFASVYAWNRKRISNCVADYSVLYNSASFSTFKCYGVSPTKLNDLCFTNVYADSFVIRGDEVRQIAPGQTGKIADYNYKLPDDFTGCVIAWNSNNLDSKVGGNYNYLYRLFRKSNLKPFERDISTEIYQAGSTPCNGVEGFNCYFPLQSYGFQPTNGVGYQPYRVVVLSFELLHAPATVCGPKKSTNLVGSGGGGDGGGGSGDKTHTCPPCPAPELLGGPSVFLFPPKPKDTLMISRTPEVTCVVVDVSHEDPEVKFNWYVDGVEVHNAKTKPREEQYNSTYRVVSVLTVLHQDWLNGKEYKCKVSNKALPAPIEKTISKAKGQPREPQVYTLPPSREELTKNQVSLTCLVKGFYPSDIAVEWESNGQPENNYKTTPPVLDSDGSFFLYSKLTVDKSRWQQGNVFSCSVMHEALHNHYTQKSLSLSPGS

SEQ ID NO: 1743 - protein, 455 aa, synthetic construct
RVQPTESIVRFPNITNLCPFGEVFNATRFASVYAWNRKRISNCVADYSVLYNSASFSTFKCYGVSPTKLNDLCFTNVYADSFVIRGDEVRQIAPGQTGKIADYNYKLPDDFTGCVIAWNSNNLDSKVGGNYNYLYRLFRKSNLKPFERDISTEIYQAGSTPCNGVEGFNCYFPLQSYGFQPTNGVGYQPYRVVVLSFELLHAPATVCGPKKSTNLGSGGGGDGGGGSGDKTHTCPPCPAPELLGGPSVFLFPPKPKDTLMISRTPEVTCVVVDVSHEDPEVKFNWYVDGVEVHNAKTKPREEQYNSTYRVVSVLTVLHQDWLNGKEYKCKVSNKALPAPIEKTISKAKGQPREPQVYTLPPSREELTKNQVSLTCLVKGFYPSDIAVEWESNGQPENNYKTTPPVLDSDGSFFLYSKLTVDKSRWQQGNVFSCSVMHEALHNHYTQKSLSLSPGS

SEQ ID NO: 1744 - protein, 454 aa, synthetic construct
RVQPTESIVRFPNITNLCPFGEVFNATRFASVYAWNRKRISNCVADYSVLYNSASFSTFKCYGVSPTKLNDLCFTNVYADSFVIRGDEVRQIAPGQTGKIADYNYKLPDDFTGCVIAWNSNNLDSKVGGNYNYLYRLFRKSNLKPFERDISTEIYQAGSTPCNGVEGFNCYFPLQSYGFQPTNGVGYQPYRVVVLSFELLHAPATVCGPKKSTNGSGGGGDGGGGSGDKTHTCPPCPAPELLGGPSVFLFPPKPKDTLMISRTPEVTCVVVDVSHEDPEVKFNWYVDGVEVHNAKTKPREEQYNSTYRVVSVLTVLHQDWLNGKEYKCKVSNKALPAPIEKTISKAKGQPREPQVYTLPPSREELTKNQVSLTCLVKGFYPSDIAVEWESNGQPENNYKTTPPVLDSDGSFFLYSKLTVDKSRWQQGNVFSCSVMHEALHNHYTQKSLSLSPGS

SEQ ID NO: 1745 - protein, 453 aa, synthetic construct
RVQPTESIVRFPNITNLCPFGEVFNATRFASVYAWNRKRISNCVADYSVLYNSASFSTFKCYGVSPTKLNDLCFTNVYADSFVIRGDEVRQIAPGQTGKIADYNYKLPDDFTGCVIAWNSNNLDSKVGGNYNYLYRLFRKSNLKPFERDISTEIYQAGSTPCNGVEGFNCYFPLQSYGFQPTNGVGYQPYRVVVLSFELLHAPATVCGPKKSTGSGGGGDGGGGSGDKTHTCPPCPAPELLGGPSVFLFPPKPKDTLMISRTPEVTCVVVDVSHEDPEVKFNWYVDGVEVHNAKTKPREEQYNSTYRVVSVLTVLHQDWLNGKEYKCKVSNKALPAPIEKTISKAKGQPREPQVYTLPPSREELTKNQVSLTCLVKGFYPSDIAVEWESNGQPENNYKTTPPVLDSDGSFFLYSKLTVDKSRWQQGNVFSCSVMHEALHNHYTQKSLSLSPGS

SEQ ID NO: 1746 - protein, 452 aa, synthetic construct
RVQPTESIVRFPNITNLCPFGEVFNATRFASVYAWNRKRISNCVADYSVLYNSASFSTFKCYGVSPTKLNDLCFTNVYADSFVIRGDEVRQIAPGQTGKIADYNYKLPDDFTGCVIAWNSNNLDSKVGGNYNYLYRLFRKSNLKPFERDISTEIYQAGSTPCNGVEGFNCYFPLQSYGFQPTNGVGYQPYRVVVLSFELLHAPATVCGPKKSGSGGGGDGGGGSGDKTHTCPPCPAPELLGGPSVFLFPPKPKDTLMISRTPEVTCVVVDVSHEDPEVKFNWYVDGVEVHNAKTKPREEQYNSTYRVVSVLTVLHQDWLNGKEYKCKVSNKALPAPIEKTISKAKGQPREPQVYTLPPSREELTKNQVSLTCLVKGFYPSDIAVEWESNGQPENNYKTTPPVLDSDGSFFLYSKLTVDKSRWQQGNVFSCSVMHEALHNHYTQKSLSLSPGS

SEQ ID NO: 1747 - DNA, 747 bp, synthetic construct
  source 1..747: mol_type = other DNA
gttcagcccaccgaatcaatagtacggttcccaaatatcactaatctttgccccttcggggaagtatttaacgctactcgatttgctagcgtatatgcctggaaccggaagagaataagcaactgtgttgcagactatagcgtgctttacaattccgcatcctttagtaccttcaaatgttacggtgtgagccccaccaaactcaatgatctctgtttcacaaacgtgtacgcagatagtttcgttatacgcggggacgaagtacggcagatagcccctggccagacaggaaagatagccgattacaactacaaacttccagacgattttacagggtgtgtgatcgcttggaattcaaataacctggactccaaagtgggaggcaactataattacctgtaccgactgttccgcaaaagcaacttgaaacctttcgagcgagatatatcaaccgaaatctaccaagctggttctacaccttgtaatggtgtggagggatttaactgctacttccctcttcagtcctatggatttcagcctacaaatggagtcgggtatcaaccctatagagtcgtggtgttgtcatttgaacttctccatgcacctgctactgtctgtggtccaaaaaagtccactaatcttgtaaaaaacaaatgcgtgaacttcaatttcaatggcctcaccggaacaggtgttttgacagaatctaacaaaaaattccttcccttccagcaattcgggagagat

SEQ ID NO: 1748 - DNA, 744 bp, synthetic construct
  source 1..744: mol_type = other DNA
cagcccaccgaatcaatagtacggttcccaaatatcactaatctttgccccttcggggaagtatttaacgctactcgatttgctagcgtatatgcctggaaccggaagagaataagcaactgtgttgcagactatagcgtgctttacaattccgcatcctttagtaccttcaaatgttacggtgtgagccccaccaaactcaatgatctctgtttcacaaacgtgtacgcagatagtttcgttatacgcggggacgaagtacggcagatagcccctggccagacaggaaagatagccgattacaactacaaacttccagacgattttacagggtgtgtgatcgcttggaattcaaataacctggactccaaagtgggaggcaactataattacctgtaccgactgttccgcaaaagcaacttgaaacctttcgagcgagatatatcaaccgaaatctaccaagctggttctacaccttgtaatggtgtggagggatttaactgctacttccctcttcagtcctatggatttcagcctacaaatggagtcgggtatcaaccctatagagtcgtggtgttgtcatttgaacttctccatgcacctgctactgtctgtggtccaaaaaagtccactaatcttgtaaaaaacaaatgcgtgaacttcaatttcaatggcctcaccggaacaggtgttttgacagaatctaacaaaaaattccttcccttccagcaattcgggagagat

SEQ ID NO: 1749 - DNA, 741 bp, synthetic construct
  source 1..741: mol_type = other DNA
cccaccgaatcaatagtacggttcccaaatatcactaatctttgccccttcggggaagtatttaacgctactcgatttgctagcgtatatgcctggaaccggaagagaataagcaactgtgttgcagactatagcgtgctttacaattccgcatcctttagtaccttcaaatgttacggtgtgagccccaccaaactcaatgatctctgtttcacaaacgtgtacgcagatagtttcgttatacgcggggacgaagtacggcagatagcccctggccagacaggaaagatagccgattacaactacaaacttccagacgattttacagggtgtgtgatcgcttggaattcaaataacctggactccaaagtgggaggcaactataattacctgtaccgactgttccgcaaaagcaacttgaaacctttcgagcgagatatatcaaccgaaatctaccaagctggttctacaccttgtaatggtgtggagggatttaactgctacttccctcttcagtcctatggatttcagcctacaaatggagtcgggtatcaaccctatagagtcgtggtgttgtcatttgaacttctccatgcacctgctactgtctgtggtccaaaaaagtccactaatcttgtaaaaaacaaatgcgtgaacttcaatttcaatggcctcaccggaacaggtgttttgacagaatctaacaaaaaattccttcccttccagcaattcgggagagat

SEQ ID NO: 1750 - DNA, 738 bp, synthetic construct
  source 1..738: mol_type = other DNA
accgaatcaatagtacggttcccaaatatcactaatctttgccccttcggggaagtatttaacgctactcgatttgctagcgtatatgcctggaaccggaagagaataagcaactgtgttgcagactatagcgtgctttacaattccgcatcctttagtaccttcaaatgttacggtgtgagccccaccaaactcaatgatctctgtttcacaaacgtgtacgcagatagtttcgttatacgcggggacgaagtacggcagatagcccctggccagacaggaaagatagccgattacaactacaaacttccagacgattttacagggtgtgtgatcgcttggaattcaaataacctggactccaaagtgggaggcaactataattacctgtaccgactgttccgcaaaagcaacttgaaacctttcgagcgagatatatcaaccgaaatctaccaagctggttctacaccttgtaatggtgtggagggatttaactgctacttccctcttcagtcctatggatttcagcctacaaatggagtcgggtatcaaccctatagagtcgtggtgttgtcatttgaacttctccatgcacctgctactgtctgtggtccaaaaaagtccactaatcttgtaaaaaacaaatgcgtgaacttcaatttcaatggcctcaccggaacaggtgttttgacagaatctaacaaaaaattccttcccttccagcaattcgggagagat

SEQ ID NO: 1751 - DNA, 735 bp, synthetic construct
  source 1..735: mol_type = other DNA
gaatcaatagtacggttcccaaatatcactaatctttgccccttcggggaagtatttaacgctactcgatttgctagcgtatatgcctggaaccggaagagaataagcaactgtgttgcagactatagcgtgctttacaattccgcatcctttagtaccttcaaatgttacggtgtgagccccaccaaactcaatgatctctgtttcacaaacgtgtacgcagatagtttcgttatacgcggggacgaagtacggcagatagcccctggccagacaggaaagatagccgattacaactacaaacttccagacgattttacagggtgtgtgatcgcttggaattcaaataacctggactccaaagtgggaggcaactataattacctgtaccgactgttccgcaaaagcaacttgaaacctttcgagcgagatatatcaaccgaaatctaccaagctggttctacaccttgtaatggtgtggagggatttaactgctacttccctcttcagtcctatggatttcagcctacaaatggagtcgggtatcaaccctatagagtcgtggtgttgtcatttgaacttctccatgcacctgctactgtctgtggtccaaaaaagtccactaatcttgtaaaaaacaaatgcgtgaacttcaatttcaatggcctcaccggaacaggtgttttgacagaatctaacaaaaaattccttcccttccagcaattcgggagagat

SEQ ID NO: 1752 - DNA, 732 bp, synthetic construct
  source 1..732: mol_type = other DNA
tcaatagtacggttcccaaatatcactaatctttgccccttcggggaagtatttaacgctactcgatttgctagcgtatatgcctggaaccggaagagaataagcaactgtgttgcagactatagcgtgctttacaattccgcatcctttagtaccttcaaatgttacggtgtgagccccaccaaactcaatgatctctgtttcacaaacgtgtacgcagatagtttcgttatacgcggggacgaagtacggcagatagcccctggccagacaggaaagatagccgattacaactacaaacttccagacgattttacagggtgtgtgatcgcttggaattcaaataacctggactccaaagtgggaggcaactataattacctgtaccgactgttccgcaaaagcaacttgaaacctttcgagcgagatatatcaaccgaaatctaccaagctggttctacaccttgtaatggtgtggagggatttaactgctacttccctcttcagtcctatggatttcagcctacaaatggagtcgggtatcaaccctatagagtcgtggtgttgtcatttgaacttctccatgcacctgctactgtctgtggtccaaaaaagtccactaatcttgtaaaaaacaaatgcgtgaacttcaatttcaatggcctcaccggaacaggtgttttgacagaatctaacaaaaaattccttcccttccagcaattcgggagagat

SEQ ID NO: 1753 - DNA, 729 bp, synthetic construct
  source 1..729: mol_type = other DNA
atagtacggttcccaaatatcactaatctttgccccttcggggaagtatttaacgctactcgatttgctagcgtatatgcctggaaccggaagagaataagcaactgtgttgcagactatagcgtgctttacaattccgcatcctttagtaccttcaaatgttacggtgtgagccccaccaaactcaatgatctctgtttcacaaacgtgtacgcagatagtttcgttatacgcggggacgaagtacggcagatagcccctggccagacaggaaagatagccgattacaactacaaacttccagacgattttacagggtgtgtgatcgcttggaattcaaataacctggactccaaagtgggaggcaactataattacctgtaccgactgttccgcaaaagcaacttgaaacctttcgagcgagatatatcaaccgaaatctaccaagctggttctacaccttgtaatggtgtggagggatttaactgctacttccctcttcagtcctatggatttcagcctacaaatggagtcgggtatcaaccctatagagtcgtggtgttgtcatttgaacttctccatgcacctgctactgtctgtggtccaaaaaagtccactaatcttgtaaaaaacaaatgcgtgaacttcaatttcaatggcctcaccggaacaggtgttttgacagaatctaacaaaaaattccttcccttccagcaattcgggagagat

SEQ ID NO: 1754 - DNA, 726 bp, synthetic construct
  source 1..726: mol_type = other DNA
gtacggttcccaaatatcactaatctttgccccttcggggaagtatttaacgctactcgatttgctagcgtatatgcctggaaccggaagagaataagcaactgtgttgcagactatagcgtgctttacaattccgcatcctttagtaccttcaaatgttacggtgtgagccccaccaaactcaatgatctctgtttcacaaacgtgtacgcagatagtttcgttatacgcggggacgaagtacggcagatagcccctggccagacaggaaagatagccgattacaactacaaacttccagacgattttacagggtgtgtgatcgcttggaattcaaataacctggactccaaagtgggaggcaactataattacctgtaccgactgttccgcaaaagcaacttgaaacctttcgagcgagatatatcaaccgaaatctaccaagctggttctacaccttgtaatggtgtggagggatttaactgctacttccctcttcagtcctatggatttcagcctacaaatggagtcgggtatcaaccctatagagtcgtggtgttgtcatttgaacttctccatgcacctgctactgtctgtggtccaaaaaagtccactaatcttgtaaaaaacaaatgcgtgaacttcaatttcaatggcctcaccggaacaggtgttttgacagaatctaacaaaaaattccttcccttccagcaattcgggagagat

SEQ ID NO: 1755 - DNA, 723 bp, synthetic construct
  source 1..723: mol_type = other DNA
cggttcccaaatatcactaatctttgccccttcggggaagtatttaacgctactcgatttgctagcgtatatgcctggaaccggaagagaataagcaactgtgttgcagactatagcgtgctttacaattccgcatcctttagtaccttcaaatgttacggtgtgagccccaccaaactcaatgatctctgtttcacaaacgtgtacgcagatagtttcgttatacgcggggacgaagtacggcagatagcccctggccagacaggaaagatagccgattacaactacaaacttccagacgattttacagggtgtgtgatcgcttggaattcaaataacctggactccaaagtgggaggcaactataattacctgtaccgactgttccgcaaaagcaacttgaaacctttcgagcgagatatatcaaccgaaatctaccaagctggttctacaccttgtaatggtgtggagggatttaactgctacttccctcttcagtcctatggatttcagcctacaaatggagtcgggtatcaaccctatagagtcgtggtgttgtcatttgaacttctccatgcacctgctactgtctgtggtccaaaaaagtccactaatcttgtaaaaaacaaatgcgtgaacttcaatttcaatggcctcaccggaacaggtgttttgacagaatctaacaaaaaattccttcccttccagcaattcgggagagat

SEQ ID NO: 1756 - DNA, 720 bp, synthetic construct
  source 1..720: mol_type = other DNA
ttcccaaatatcactaatctttgccccttcggggaagtatttaacgctactcgatttgctagcgtatatgcctggaaccggaagagaataagcaactgtgttgcagactatagcgtgctttacaattccgcatcctttagtaccttcaaatgttacggtgtgagccccaccaaactcaatgatctctgtttcacaaacgtgtacgcagatagtttcgttatacgcggggacgaagtacggcagatagcccctggccagacaggaaagatagccgattacaactacaaacttccagacgattttacagggtgtgtgatcgcttggaattcaaataacctggactccaaagtgggaggcaactataattacctgtaccgactgttccgcaaaagcaacttgaaacctttcgagcgagatatatcaaccgaaatctaccaagctggttctacaccttgtaatggtgtggagggatttaactgctacttccctcttcagtcctatggatttcagcctacaaatggagtcgggtatcaaccctatagagtcgtggtgttgtcatttgaacttctccatgcacctgctactgtctgtggtccaaaaaagtccactaatcttgtaaaaaacaaatgcgtgaacttcaatttcaatggcctcaccggaacaggtgttttgacagaatctaacaaaaaattccttcccttccagcaattcgggagagat

SEQ ID NO: 1757 - DNA, 717 bp, synthetic construct
  source 1..717: mol_type = other DNA
ccaaatatcactaatctttgccccttcggggaagtatttaacgctactcgatttgctagcgtatatgcctggaaccggaagagaataagcaactgtgttgcagactatagcgtgctttacaattccgcatcctttagtaccttcaaatgttacggtgtgagccccaccaaactcaatgatctctgtttcacaaacgtgtacgcagatagtttcgttatacgcggggacgaagtacggcagatagcccctggccagacaggaaagatagccgattacaactacaaacttccagacgattttacagggtgtgtgatcgcttggaattcaaataacctggactccaaagtgggaggcaactataattacctgtaccgactgttccgcaaaagcaacttgaaacctttcgagcgagatatatcaaccgaaatctaccaagctggttctacaccttgtaatggtgtggagggatttaactgctacttccctcttcagtcctatggatttcagcctacaaatggagtcgggtatcaaccctatagagtcgtggtgttgtcatttgaacttctccatgcacctgctactgtctgtggtccaaaaaagtccactaatcttgtaaaaaacaaatgcgtgaacttcaatttcaatggcctcaccggaacaggtgttttgacagaatctaacaaaaaattccttcccttccagcaattcgggagagat

SEQ ID NO: 1758 - DNA, 714 bp, synthetic construct; identical to SEQ ID NO: 30
  source 1..714: mol_type = other DNA

SEQ ID NO: 1759 - DNA, 711 bp, synthetic construct
  source 1..711: mol_type = other DNA
atcactaatctttgccccttcggggaagtatttaacgctactcgatttgctagcgtatatgcctggaaccggaagagaataagcaactgtgttgcagactatagcgtgctttacaattccgcatcctttagtaccttcaaatgttacggtgtgagccccaccaaactcaatgatctctgtttcacaaacgtgtacgcagatagtttcgttatacgcggggacgaagtacggcagatagcccctggccagacaggaaagatagccgattacaactacaaacttccagacgattttacagggtgtgtgatcgcttggaattcaaataacctggactccaaagtgggaggcaactataattacctgtaccgactgttccgcaaaagcaacttgaaacctttcgagcgagatatatcaaccgaaatctaccaagctggttctacaccttgtaatggtgtggagggatttaactgctacttccctcttcagtcctatggatttcagcctacaaatggagtcgggtatcaaccctatagagtcgtggtgttgtcatttgaacttctccatgcacctgctactgtctgtggtccaaaaaagtccactaatcttgtaaaaaacaaatgcgtgaacttcaatttcaatggcctcaccggaacaggtgttttgacagaatctaacaaaaaattccttcccttccagcaattcgggagagat

SEQ ID NO: 1760 - DNA, 708 bp, synthetic construct
  source 1..708: mol_type = other DNA
actaatctttgccccttcggggaagtatttaacgctactcgatttgctagcgtatatgcctggaaccggaagagaataagcaactgtgttgcagactatagcgtgctttacaattccgcatcctttagtaccttcaaatgttacggtgtgagccccaccaaactcaatgatctctgtttcacaaacgtgtacgcagatagtttcgttatacgcggggacgaagtacggcagatagcccctggccagacaggaaagatagccgattacaactacaaacttccagacgattttacagggtgtgtgatcgcttggaattcaaataacctggactccaaagtgggaggcaactataattacctgtaccgactgttccgcaaaagcaacttgaaacctttcgagcgagatatatcaaccgaaatctaccaagctggttctacaccttgtaatggtgtggagggatttaactgctacttccctcttcagtcctatggatttcagcctacaaatggagtcgggtatcaaccctatagagtcgtggtgttgtcatttgaacttctccatgcacctgctactgtctgtggtccaaaaaagtccactaatcttgtaaaaaacaaatgcgtgaacttcaatttcaatggcctcaccggaacaggtgttttgacagaatctaacaaaaaattccttcccttccagcaattcgggagagat

SEQ ID NO: 1761 - DNA, 705 bp, synthetic construct
  source 1..705: mol_type = other DNA
aatctttgccccttcggggaagtatttaacgctactcgatttgctagcgtatatgcctggaaccggaagagaataagcaactgtgttgcagactatagcgtgctttacaattccgcatcctttagtaccttcaaatgttacggtgtgagccccaccaaactcaatgatctctgtttcacaaacgtgtacgcagatagtttcgttatacgcggggacgaagtacggcagatagcccctggccagacaggaaagatagccgattacaactacaaacttccagacgattttacagggtgtgtgatcgcttggaattcaaataacctggactccaaagtgggaggcaactataattacctgtaccgactgttccgcaaaagcaacttgaaacctttcgagcgagatatatcaaccgaaatctaccaagctggttctacaccttgtaatggtgtggagggatttaactgctacttccctcttcagtcctatggatttcagcctacaaatggagtcgggtatcaaccctatagagtcgtggtgttgtcatttgaacttctccatgcacctgctactgtctgtggtccaaaaaagtccactaatcttgtaaaaaacaaatgcgtgaacttcaatttcaatggcctcaccggaacaggtgttttgacagaatctaacaaaaaattccttcccttccagcaattcgggagagat

SEQ ID NO: 1762 - DNA, 702 bp, synthetic construct
  source 1..702: mol_type = other DNA
ctttgccccttcggggaagtatttaacgctactcgatttgctagcgtatatgcctggaaccggaagagaataagcaactgtgttgcagactatagcgtgctttacaattccgcatcctttagtaccttcaaatgttacggtgtgagccccaccaaactcaatgatctctgtttcacaaacgtgtacgcagatagtttcgttatacgcggggacgaagtacggcagatagcccctggccagacaggaaagatagccgattacaactacaaacttccagacgattttacagggtgtgtgatcgcttggaattcaaataacctggactccaaagtgggaggcaactataattacctgtaccgactgttccgcaaaagcaacttgaaacctttcgagcgagatatatcaaccgaaatctaccaagctggttctacaccttgtaatggtgtggagggatttaactgctacttccctcttcagtcctatggatttcagcctacaaatggagtcgggtatcaaccctatagagtcgtggtgttgtcatttgaacttctccatgcacctgctactgtctgtggtccaaaaaagtccactaatcttgtaaaaaacaaatgcgtgaacttcaatttcaatggcctcaccggaacaggtgttttgacagaatctaacaaaaaattccttcccttccagcaattcgggagagat

SEQ ID NO: 1763 - DNA, 699 bp, synthetic construct
  source 1..699: mol_type = other DNA
tgccccttcggggaagtatttaacgctactcgatttgctagcgtatatgcctggaaccggaagagaataagcaactgtgttgcagactatagcgtgctttacaattccgcatcctttagtaccttcaaatgttacggtgtgagccccaccaaactcaatgatctctgtttcacaaacgtgtacgcagatagtttcgttatacgcggggacgaagtacggcagatagcccctggccagacaggaaagatagccgattacaactacaaacttccagacgattttacagggtgtgtgatcgcttggaattcaaataacctggactccaaagtgggaggcaactataattacctgtaccgactgttccgcaaaagcaacttgaaacctttcgagcgagatatatcaaccgaaatctaccaagctggttctacaccttgtaatggtgtggagggatttaactgctacttccctcttcagtcctatggatttcagcctacaaatggagtcgggtatcaaccctatagagtcgtggtgttgtcatttgaacttctccatgcacctgctactgtctgtggtccaaaaaagtccactaatcttgtaaaaaacaaatgcgtgaacttcaatttcaatggcctcaccggaacaggtgttttgacagaatctaacaaaaaattccttcccttccagcaattcgggagagat

SEQ ID NO: 1764 - DNA, 696 bp, synthetic construct
  source 1..696: mol_type = other DNA
cccttcggggaagtatttaacgctactcgatttgctagcgtatatgcctggaaccggaagagaataagcaactgtgttgcagactatagcgtgctttacaattccgcatcctttagtaccttcaaatgttacggtgtgagccccaccaaactcaatgatctctgtttcacaaacgtgtacgcagatagtttcgttatacgcggggacgaagtacggcagatagcccctggccagacaggaaagatagccgattacaactacaaacttccagacgattttacagggtgtgtgatcgcttggaattcaaataacctggactccaaagtgggaggcaactataattacctgtaccgactgttccgcaaaagcaacttgaaacctttcgagcgagatatatcaaccgaaatctaccaagctggttctacaccttgtaatggtgtggagggatttaactgctacttccctcttcagtcctatggatttcagcctacaaatggagtcgggtatcaaccctatagagtcgtggtgttgtcatttgaacttctccatgcacctgctactgtctgtggtccaaaaaagtccactaatcttgtaaaaaacaaatgcgtgaacttcaatttcaatggcctcaccggaacaggtgttttgacagaatctaacaaaaaattccttcccttccagcaattcgggagagat

SEQ ID NO: 1765 - DNA, 693 bp, synthetic construct
  source 1..693: mol_type = other DNA
ttcggggaagtatttaacgctactcgatttgctagcgtatatgcctggaaccggaagagaataagcaactgtgttgcagactatagcgtgctttacaattccgcatcctttagtaccttcaaatgttacggtgtgagccccaccaaactcaatgatctctgtttcacaaacgtgtacgcagatagtttcgttatacgcggggacgaagtacggcagatagcccctggccagacaggaaagatagccgattacaactacaaacttccagacgattttacagggtgtgtgatcgcttggaattcaaataacctggactccaaagtgggaggcaactataattacctgtaccgactgttccgcaaaagcaacttgaaacctttcgagcgagatatatcaaccgaaatctaccaagctggttctacaccttgtaatggtgtggagggatttaactgctacttccctcttcagtcctatggatttcagcctacaaatggagtcgggtatcaaccctatagagtcgtggtgttgtcatttgaacttctccatgcacctgctactgtctgtggtccaaaaaagtccactaatcttgtaaaaaacaaatgcgtgaacttcaatttcaatggcctcaccggaacaggtgttttgacagaatctaacaaaaaattccttcccttccagcaattcgggagagat

SEQ ID NO: 1766 - DNA, 690 bp, synthetic construct
  source 1..690: mol_type = other DNA
ggggaagtatttaacgctactcgatttgctagcgtatatgcctggaaccggaagagaataagcaactgtgttgcagactatagcgtgctttacaattccgcatcctttagtaccttcaaatgttacggtgtgagccccaccaaactcaatgatctctgtttcacaaacgtgtacgcagatagtttcgttatacgcggggacgaagtacggcagatagcccctggccagacaggaaagatagccgattacaactacaaacttccagacgattttacagggtgtgtgatcgcttggaattcaaataacctggactccaaagtgggaggcaactataattacctgtaccgactgttccgcaaaagcaacttgaaacctttcgagcgagatatatcaaccgaaatctaccaagctggttctacaccttgtaatggtgtggagggatttaactgctacttccctcttcagtcctatggatttcagcctacaaatggagtcgggtatcaaccctatagagtcgtggtgttgtcatttgaacttctccatgcacctgctactgtctgtggtccaaaaaagtccactaatcttgtaaaaaacaaatgcgtgaacttcaatttcaatggcctcaccggaacaggtgttttgacagaatctaacaaaaaattccttcccttccagcaattcgggagagat

SEQ ID NO: 1767 - DNA, 687 bp, synthetic construct
  source 1..687: mol_type = other DNA
gaagtatttaacgctactcgatttgctagcgtatatgcctggaaccggaagagaataagcaactgtgttgcagactatagcgtgctttacaattccgcatcctttagtaccttcaaatgttacggtgtgagccccaccaaactcaatgatctctgtttcacaaacgtgtacgcagatagtttcgttatacgcggggacgaagtacggcagatagcccctggccagacaggaaagatagccgattacaactacaaacttccagacgattttacagggtgtgtgatcgcttggaattcaaataacctggactccaaagtgggaggcaactataattacctgtaccgactgttccgcaaaagcaacttgaaacctttcgagcgagatatatcaaccgaaatctaccaagctggttctacaccttgtaatggtgtggagggatttaactgctacttccctcttcagtcctatggatttcagcctacaaatggagtcgggtatcaaccctatagagtcgtggtgttgtcatttgaacttctccatgcacctgctactgtctgtggtccaaaaaagtccactaatcttgtaaaaaacaaatgcgtgaacttcaatttcaatggcctcaccggaacaggtgttttgacagaatctaacaaaaaattccttcccttccagcaattcgggagagat

SEQ ID NO: 1768 - DNA, 684 bp, synthetic construct
  source 1..684: mol_type = other DNA
gtatttaacgctactcgatttgctagcgtatatgcctggaaccggaagagaataagcaactgtgttgcagactatagcgtgctttacaattccgcatcctttagtaccttcaaatgttacggtgtgagccccaccaaactcaatgatctctgtttcacaaacgtgtacgcagatagtttcgttatacgcggggacgaagtacggcagatagcccctggccagacaggaaagatagccgattacaactacaaacttccagacgattttacagggtgtgtgatcgcttggaattcaaataacctggactccaaagtgggaggcaactataattacctgtaccgactgttccgcaaaagcaacttgaaacctttcgagcgagatatatcaaccgaaatctaccaagctggttctacaccttgtaatggtgtggagggatttaactgctacttccctcttcagtcctatggatttcagcctacaaatggagtcgggtatcaaccctatagagtcgtggtgttgtcatttgaacttctccatgcacctgctactgtctgtggtccaaaaaagtccactaatcttgtaaaaaacaaatgcgtgaacttcaatttcaatggcctcaccggaacaggtgttttgacagaatctaacaaaaaattccttcccttccagcaattcgggagagat

SEQ ID NO: 1769 - DNA, 681 bp, synthetic construct
  source 1..681: mol_type = other DNA
tttaacgctactcgatttgctagcgtatatgcctggaaccggaagagaataagcaactgtgttgcagactatagcgtgctttacaattccgcatcctttagtaccttcaaatgttacggtgtgagccccaccaaactcaatgatctctgtttcacaaacgtgtacgcagatagtttcgttatacgcggggacgaagtacggcagatagcccctggccagacaggaaagatagccgattacaactacaaacttccagacgattttacagggtgtgtgatcgcttggaattcaaataacctggactccaaagtgggaggcaactataattacctgtaccgactgttccgcaaaagcaacttgaaacctttcgagcgagatatatcaaccgaaatctaccaagctggttctacaccttgtaatggtgtggagggatttaactgctacttccctcttcagtcctatggatttcagcctacaaatggagtcgggtatcaaccctatagagtcgtggtgttgtcatttgaacttctccatgcacctgctactgtctgtggtccaaaaaagtccactaatcttgtaaaaaacaaatgcgtgaacttcaatttcaatggcctcaccggaacaggtgttttgacagaatctaacaaaaaattccttcccttccagcaattcgggagagat

SEQ ID NO: 1770 - DNA, 678 bp, synthetic construct
  source 1..678: mol_type = other DNA
aacgctactcgatttgctagcgtatatgcctggaaccggaagagaataagcaactgtgttgcagactatagcgtgctttacaattccgcatcctttagtaccttcaaatgttacggtgtgagccccaccaaactcaatgatctctgtttcacaaacgtgtacgcagatagtttcgttatacgcggggacgaagtacggcagatagcccctggccagacaggaaagatagccgattacaactacaaacttccagacgattttacagggtgtgtgatcgcttggaattcaaataacctggactccaaagtgggaggcaactataattacctgtaccgactgttccgcaaaagcaacttgaaacctttcgagcgagatatatcaaccgaaatctaccaagctggttctacaccttgtaatggtgtggagggatttaactgctacttccctcttcagtcctatggatttcagcctacaaatggagtcgggtatcaaccctatagagtcgtggtgttgtcatttgaacttctccatgcacctgctactgtctgtggtccaaaaaagtccactaatcttgtaaaaaacaaatgcgtgaacttcaatttcaatggcctcaccggaacaggtgttttgacagaatctaacaaaaaattccttcccttccagcaattcgggagagat

SEQ ID NO: 1771 - DNA, 675 bp, synthetic construct
  source 1..675: mol_type = other DNA
gctactcgatttgctagcgtatatgcctggaaccggaagagaataagcaactgtgttgcagactatagcgtgctttacaattccgcatcctttagtaccttcaaatgttacggtgtgagccccaccaaactcaatgatctctgtttcacaaacgtgtacgcagatagtttcgttatacgcggggacgaagtacggcagatagcccctggccagacaggaaagatagccgattacaactacaaacttccagacgattttacagggtgtgtgatcgcttggaattcaaataacctggactccaaagtgggaggcaactataattacctgtaccgactgttccgcaaaagcaacttgaaacctttcgagcgagatatatcaaccgaaatctaccaagctggttctacaccttgtaatggtgtggagggatttaactgctacttccctcttcagtcctatggatttcagcctacaaatggagtcgggtatcaaccctatagagtcgtggtgttgtcatttgaacttctccatgcacctgctactgtctgtggtccaaaaaagtccactaatcttgtaaaaaacaaatgcgtgaacttcaatttcaatggcctcaccggaacaggtgttttgacagaatctaacaaaaaattccttcccttccagcaattcgggagagat

SEQ ID NO: 1772 - DNA, 672 bp, synthetic construct
  source 1..672: mol_type = other DNA
actcgatttgctagcgtatatgcctggaaccggaagagaataagcaactgtgttgcagactatagcgtgctttacaattccgcatcctttagtaccttcaaatgttacggtgtgagccccaccaaactcaatgatctctgtttcacaaacgtgtacgcagatagtttcgttatacgcggggacgaagtacggcagatagcccctggccagacaggaaagatagccgattacaactacaaacttccagacgattttacagggtgtgtgatcgcttggaattcaaataacctggactccaaagtgggaggcaactataattacctgtaccgactgttccgcaaaagcaacttgaaacctttcgagcgagatatatcaaccgaaatctaccaagctggttctacaccttgtaatggtgtggagggatttaactgctacttccctcttcagtcctatggatttcagcctacaaatggagtcgggtatcaaccctatagagtcgtggtgttgtcatttgaacttctccatgcacctgctactgtctgtggtccaaaaaagtccactaatcttgtaaaaaacaaatgcgtgaacttcaatttcaatggcctcaccggaacaggtgttttgacagaatctaacaaaaaattccttcccttccagcaattcgggagagat

SEQ ID NO: 1773 - DNA, 669 bp, synthetic construct
  source 1..669: mol_type = other DNA
cgatttgctagcgtatatgcctggaaccggaagagaataagcaactgtgttgcagactatagcgtgctttacaattccgcatcctttagtaccttcaaatgttacggtgtgagccccaccaaactcaatgatctctgtttcacaaacgtgtacgcagatagtttcgttatacgcggggacgaagtacggcagatagcccctggccagacaggaaagatagccgattacaactacaaacttccagacgattttacagggtgtgtgatcgcttggaattcaaataacctggactccaaagtgggaggcaactataattacctgtaccgactgttccgcaaaagcaacttgaaacctttcgagcgagatatatcaaccgaaatctaccaagctggttctacaccttgtaatggtgtggagggatttaactgctacttccctcttcagtcctatggatttcagcctacaaatggagtcgggtatcaaccctatagagtcgtggtgttgtcatttgaacttctccatgcacctgctactgtctgtggtccaaaaaagtccactaatcttgtaaaaaacaaatgcgtgaacttcaatttcaatggcctcaccggaacaggtgttttgacagaatctaacaaaaaattccttcccttccagcaattcgggagagat

SEQ ID NO: 1774 - DNA, 666 bp, synthetic construct
  source 1..666: mol_type = other DNA
tttgctagcgtatatgcctggaaccggaagagaataagcaactgtgttgcagactatagcgtgctttacaattccgcatcctttagtaccttcaaatgttacggtgtgagccccaccaaactcaatgatctctgtttcacaaacgtgtacgcagatagtttcgttatacgcggggacgaagtacggcagatagcccctggccagacaggaaagatagccgattacaactacaaacttccagacgattttacagggtgtgtgatcgcttggaattcaaataacctggactccaaagtgggaggcaactataattacctgtaccgactgttccgcaaaagcaacttgaaacctttcgagcgagatatatcaaccgaaatctaccaagctggttctacaccttgtaatggtgtggagggatttaactgctacttccctcttcagtcctatggatttcagcctacaaatggagtcgggtatcaaccctatagagtcgtggtgttgtcatttgaacttctccatgcacctgctactgtctgtggtccaaaaaagtccactaatcttgtaaaaaacaaatgcgtgaacttcaatttcaatggcctcaccggaacaggtgttttgacagaatctaacaaaaaattccttcccttccagcaattcgggagagat

SEQ ID NO: 1775 - DNA, 663 bp, synthetic construct
  source 1..663: mol_type = other DNA
gctagcgtatatgcctggaaccggaagagaataagcaactgtgttgcagactatagcgtgctttacaattccgcatcctttagtaccttcaaatgttacggtgtgagccccaccaaactcaatgatctctgtttcacaaacgtgtacgcagatagtttcgttatacgcggggacgaagtacggcagatagcccctggccagacaggaaagatagccgattacaactacaaacttccagacgattttacagggtgtgtgatcgcttggaattcaaataacctggactccaaagtgggaggcaactataattacctgtaccgactgttccgcaaaagcaacttgaaacctttcgagcgagatatatcaaccgaaatctaccaagctggttctacaccttgtaatggtgtggagggatttaactgctacttccctcttcagtcctatggatttcagcctacaaatggagtcgggtatcaaccctatagagtcgtggtgttgtcatttgaacttctccatgcacctgctactgtctgtggtccaaaaaagtccactaatcttgtaaaaaacaaatgcgtgaacttcaatttcaatggcctcaccggaacaggtgttttgacagaatctaacaaaaaattccttcccttccagcaattcgggagagat

SEQ ID NO: 1776 - DNA, 660 bp, synthetic construct
  source 1..660: mol_type = other DNA
agcgtatatgcctggaaccggaagagaataagcaactgtgttgcagactatagcgtgctttacaattccgcatcctttagtaccttcaaatgttacggtgtgagccccaccaaactcaatgatctctgtttcacaaacgtgtacgcagatagtttcgttatacgcggggacgaagtacggcagatagcccctggccagacaggaaagatagccgattacaactacaaacttccagacgattttacagggtgtgtgatcgcttggaattcaaataacctggactccaaagtgggaggcaactataattacctgtaccgactgttccgcaaaagcaacttgaaacctttcgagcgagatatatcaaccgaaatctaccaagctggttctacaccttgtaatggtgtggagggatttaactgctacttccctcttcagtcctatggatttcagcctacaaatggagtcgggtatcaaccctatagagtcgtggtgttgtcatttgaacttctccatgcacctgctactgtctgtggtccaaaaaagtccactaatcttgtaaaaaacaaatgcgtgaacttcaatttcaatggcctcaccggaacaggtgttttgacagaatctaacaaaaaattccttcccttccagcaattcgggagagat

SEQ ID NO: 1777 - DNA, 657 bp, synthetic construct
  source 1..657: mol_type = other DNA
gtatatgcctggaaccggaagagaataagcaactgtgttgcagactatagcgtgctttacaattccgcatcctttagtaccttcaaatgttacggtgtgagccccaccaaactcaatgatctctgtttcacaaacgtgtacgcagatagtttcgttatacgcggggacgaagtacggcagatagcccctggccagacaggaaagatagccgattacaactacaaacttccagacgattttacagggtgtgtgatcgcttggaattcaaataacctggactccaaagtgggaggcaactataattacctgtaccgactgttccgcaaaagcaacttgaaacctttcgagcgagatatatcaaccgaaatctaccaagctggttctacaccttgtaatggtgtggagggatttaactgctacttccctcttcagtcctatggatttcagcctacaaatggagtcgggtatcaaccctatagagtcgtggtgttgtcatttgaacttctccatgcacctgctactgtctgtggtccaaaaaagtccactaatcttgtaaaaaacaaatgcgtgaacttcaatttcaatggcctcaccggaacaggtgttttgacagaatctaacaaaaaattccttcccttccagcaattcgggagagat

SEQ ID NO: 1778 - DNA, 654 bp, synthetic construct
  source 1..654: mol_type = other DNA
tatgcctggaaccggaagagaataagcaactgtgttgcagactatagcgtgctttacaattccgcatcctttagtaccttcaaatgttacggtgtgagccccaccaaactcaatgatctctgtttcacaaacgtgtacgcagatagtttcgttatacgcggggacgaagtacggcagatagcccctggccagacaggaaagatagccgattacaactacaaacttccagacgattttacagggtgtgtgatcgcttggaattcaaataacctggactccaaagtgggaggcaactataattacctgtaccgactgttccgcaaaagcaacttgaaacctttcgagcgagatatatcaaccgaaatctaccaagctggttctacaccttgtaatggtgtggagggatttaactgctacttccctcttcagtcctatggatttcagcctacaaatggagtcgggtatcaaccctatagagtcgtggtgttgtcatttgaacttctccatgcacctgctactgtctgtggtccaaaaaagtccactaatcttgtaaaaaacaaatgcgtgaacttcaatttcaatggcctcaccggaacaggtgttttgacagaatctaacaaaaaattccttcccttccagcaattcgggagagat

SEQ ID NO: 1779 - DNA, 651 bp, synthetic construct
  source 1..651: mol_type = other DNA
gcctggaaccggaagagaataagcaactgtgttgcagactatagcgtgctttacaattccgcatcctttagtaccttcaaatgttacggtgtgagccccaccaaactcaatgatctctgtttcacaaacgtgtacgcagatagtttcgttatacgcggggacgaagtacggcagatagcccctggccagacaggaaagatagccgattacaactacaaacttccagacgattttacagggtgtgtgatcgcttggaattcaaataacctggactccaaagtgggaggcaactataattacctgtaccgactgttccgcaaaagcaacttgaaacctttcgagcgagatatatcaaccgaaatctaccaagctggttctacaccttgtaatggtgtggagggatttaactgctacttccctcttcagtcctatggatttcagcctacaaatggagtcgggtatcaaccctatagagtcgtggtgttgtcatttgaacttctccatgcacctgctactgtctgtggtccaaaaaagtccactaatcttgtaaaaaacaaatgcgtgaacttcaatttcaatggcctcaccggaacaggtgttttgacagaatctaacaaaaaattccttcccttccagcaattcgggagagat

SEQ ID NO: 1780 - DNA, 648 bp, synthetic construct
  source 1..648: mol_type = other DNA
tggaaccggaagagaataagcaactgtgttgcagactatagcgtgctttacaattccgcatcctttagtaccttcaaatgttacggtgtgagccccaccaaactcaatgatctctgtttcacaaacgtgtacgcagatagtttcgttatacgcggggacgaagtacggcagatagcccctggccagacaggaaagatagccgattacaactacaaacttccagacgattttacagggtgtgtgatcgcttggaattcaaataacctggactccaaagtgggaggcaactataattacctgtaccgactgttccgcaaaagcaacttgaaacctttcgagcgagatatatcaaccgaaatctaccaagctggttctacaccttgtaatggtgtggagggatttaactgctacttccctcttcagtcctatggatttcagcctacaaatggagtcgggtatcaaccctatagagtcgtggtgttgtcatttgaacttctccatgcacctgctactgtctgtggtccaaaaaagtccactaatcttgtaaaaaacaaatgcgtgaacttcaatttcaatggcctcaccggaacaggtgttttgacagaatctaacaaaaaattccttcccttccagcaattcgggagagat

SEQ ID NO: 1781 - DNA, 645 bp, synthetic construct
  source 1..645: mol_type = other DNA
aaccggaagagaataagcaactgtgttgcagactatagcgtgctttacaattccgcatcctttagtaccttcaaatgttacggtgtgagccccaccaaactcaatgatctctgtttcacaaacgtgtacgcagatagtttcgttatacgcggggacgaagtacggcagatagcccctggccagacaggaaagatagccgattacaactacaaacttccagacgattttacagggtgtgtgatcgcttggaattcaaataacctggactccaaagtgggaggcaactataattacctgtaccgactgttccgcaaaagcaacttgaaacctttcgagcgagatatatcaaccgaaatctaccaagctggttctacaccttgtaatggtgtggagggatttaactgctacttccctcttcagtcctatggatttcagcctacaaatggagtcgggtatcaaccctatagagtcgtggtgttgtcatttgaacttctccatgcacctgctactgtctgtggtccaaaaaagtccactaatcttgtaaaaaacaaatgcgtgaacttcaatttcaatggcctcaccggaacaggtgttttgacagaatctaacaaaaaattccttcccttccagcaattcgggagagat

SEQ ID NO: 1782 - DNA, 642 bp, synthetic construct
  source 1..642: mol_type = other DNA
cggaagagaataagcaactgtgttgcagactatagcgtgctttacaattccgcatcctttagtaccttcaaatgttacggtgtgagccccaccaaactcaatgatctctgtttcacaaacgtgtacgcagatagtttcgttatacgcggggacgaagtacggcagatagcccctggccagacaggaaagatagccgattacaactacaaacttccagacgattttacagggtgtgtgatcgcttggaattcaaataacctggactccaaagtgggaggcaactataattacctgtaccgactgttccgcaaaagcaacttgaaacctttcgagcgagatatatcaaccgaaatctaccaagctggttctacaccttgtaatggtgtggagggatttaactgctacttccctcttcagtcctatggatttcagcctacaaatggagtcgggtatcaaccctatagagtcgtggtgttgtcatttgaacttctccatgcacctgctactgtctgtggtccaaaaaagtccactaatcttgtaaaaaacaaatgcgtgaacttcaatttcaatggcctcaccggaacaggtgttttgacagaatctaacaaaaaattccttcccttccagcaattcgggagagat

SEQ ID NO: 1783 - DNA, 639 bp, synthetic construct
  source 1..639: mol_type = other DNA
aagagaataagcaactgtgttgcagactatagcgtgctttacaattccgcatcctttagtaccttcaaatgttacggtgtgagccccaccaaactcaatgatctctgtttcacaaacgtgtacgcagatagtttcgttatacgcggggacgaagtacggcagatagcccctggccagacaggaaagatagccgattacaactacaaacttccagacgattttacagggtgtgtgatcgcttggaattcaaataacctggactccaaagtgggaggcaactataattacctgtaccgactgttccgcaaaagcaacttgaaacctttcgagcgagatatatcaaccgaaatctaccaagctggttctacaccttgtaatggtgtggagggatttaactgctacttccctcttcagtcctatggatttcagcctacaaatggagtcgggtatcaaccctatagagtcgtggtgttgtcatttgaacttctccatgcacctgctactgtctgtggtccaaaaaagtccactaatcttgtaaaaaacaaatgcgtgaacttcaatttcaatggcctcaccggaacaggtgttttgacagaatctaacaaaaaattccttcccttccagcaattcgggagagat

SEQ ID NO: 1784 - DNA, 636 bp, synthetic construct
  source 1..636: mol_type = other DNA
agaataagcaactgtgttgcagactatagcgtgctttacaattccgcatcctttagtaccttcaaatgttacggtgtgagccccaccaaactcaatgatctctgtttcacaaacgtgtacgcagatagtttcgttatacgcggggacgaagtacggcagatagcccctggccagacaggaaagatagccgattacaactacaaacttccagacgattttacagggtgtgtgatcgcttggaattcaaataacctggactccaaagtgggaggcaactataattacctgtaccgactgttccgcaaaagcaacttgaaacctttcgagcgagatatatcaaccgaaatctaccaagctggttctacaccttgtaatggtgtggagggatttaactgctacttccctcttcagtcctatggatttcagcctacaaatggagtcgggtatcaaccctatagagtcgtggtgttgtcatttgaacttctccatgcacctgctactgtctgtggtccaaaaaagtccactaatcttgtaaaaaacaaatgcgtgaacttcaatttcaatggcctcaccggaacaggtgttttgacagaatctaacaaaaaattccttcccttccagcaattcgggagagat

SEQ ID NO: 1785 - DNA, 633 bp, synthetic construct
  source 1..633: mol_type = other DNA
ataagcaactgtgttgcagactatagcgtgctttacaattccgcatcctttagtaccttcaaatgttacggtgtgagccccaccaaactcaatgatctctgtttcacaaacgtgtacgcagatagtttcgttatacgcggggacgaagtacggcagatagcccctggccagacaggaaagatagccgattacaactacaaacttccagacgattttacagggtgtgtgatcgcttggaattcaaataacctggactccaaagtgggaggcaactataattacctgtaccgactgttccgcaaaagcaacttgaaacctttcgagcgagatatatcaaccgaaatctaccaagctggttctacaccttgtaatggtgtggagggatttaactgctacttccctcttcagtcctatggatttcagcctacaaatggagtcgggtatcaaccctatagagtcgtggtgttgtcatttgaacttctccatgcacctgctactgtctgtggtccaaaaaagtccactaatcttgtaaaaaacaaatgcgtgaacttcaatttcaatggcctcaccggaacaggtgttttgacagaatctaacaaaaaattccttcccttccagcaattcgggagagat

SEQ ID NO: 1786 - DNA, 630 bp, synthetic construct
  source 1..630: mol_type = other DNA
agcaactgtgttgcagactatagcgtgctttacaattccgcatcctttagtaccttcaaatgttacggtgtgagccccaccaaactcaatgatctctgtttcacaaacgtgtacgcagatagtttcgttatacgcggggacgaagtacggcagatagcccctggccagacaggaaagatagccgattacaactacaaacttccagacgattttacagggtgtgtgatcgcttggaattcaaataacctggactccaaagtgggaggcaactataattacctgtaccgactgttccgcaaaagcaacttgaaacctttcgagcgagatatatcaaccgaaatctaccaagctggttctacaccttgtaatggtgtggagggatttaactgctacttccctcttcagtcctatggatttcagcctacaaatggagtcgggtatcaaccctatagagtcgtggtgttgtcatttgaacttctccatgcacctgctactgtctgtggtccaaaaaagtccactaatcttgtaaaaaacaaatgcgtgaacttcaatttcaatggcctcaccggaacaggtgttttgacagaatctaacaaaaaattccttcccttccagcaattcgggagagat

SEQ ID NO: 1787 - DNA, 627 bp, synthetic construct
  source 1..627: mol_type = other DNA
aactgtgttgcagactatagcgtgctttacaattccgcatcctttagtaccttcaaatgttacggtgtgagccccaccaaactcaatgatctctgtttcacaaacgtgtacgcagatagtttcgttatacgcggggacgaagtacggcagatagcccctggccagacaggaaagatagccgattacaactacaaacttccagacgattttacagggtgtgtgatcgcttggaattcaaataacctggactccaaagtgggaggcaactataattacctgtaccgactgttccgcaaaagcaacttgaaacctttcgagcgagatatatcaaccgaaatctaccaagctggttctacaccttgtaatggtgtggagggatttaactgctacttccctcttcagtcctatggatttcagcctacaaatggagtcgggtatcaaccctatagagtcgtggtgttgtcatttgaacttctccatgcacctgctactgtctgtggtccaaaaaagtccactaatcttgtaaaaaacaaatgcgtgaacttcaatttcaatggcctcaccggaacaggtgttttgacagaatctaacaaaaaattccttcccttccagcaattcgggagagat

SEQ ID NO: 1788 - DNA, 624 bp, synthetic construct
  source 1..624: mol_type = other DNA
tgtgttgcagactatagcgtgctttacaattccgcatcctttagtaccttcaaatgttacggtgtgagccccaccaaactcaatgatctctgtttcacaaacgtgtacgcagatagtttcgttatacgcggggacgaagtacggcagatagcccctggccagacaggaaagatagccgattacaactacaaacttccagacgattttacagggtgtgtgatcgcttggaattcaaataacctggactccaaagtgggaggcaactataattacctgtaccgactgttccgcaaaagcaacttgaaacctttcgagcgagatatatcaaccgaaatctaccaagctggttctacaccttgtaatggtgtggagggatttaactgctacttccctcttcagtcctatggatttcagcctacaaatggagtcgggtatcaaccctatagagtcgtggtgttgtcatttgaacttctccatgcacctgctactgtctgtggtccaaaaaagtccactaatcttgtaaaaaacaaatgcgtgaacttcaatttcaatggcctcaccggaacaggtgttttgacagaatctaacaaaaaattccttcccttccagcaattcgggagagat

SEQ ID NO: 1789 - DNA, 621 bp, synthetic construct
  source 1..621: mol_type = other DNA
gttgcagactatagcgtgctttacaattccgcatcctttagtaccttcaaatgttacggtgtgagccccaccaaactcaatgatctctgtttcacaaacgtgtacgcagatagtttcgttatacgcggggacgaagtacggcagatagcccctggccagacaggaaagatagccgattacaactacaaacttccagacgattttacagggtgtgtgatcgcttggaattcaaataacctggactccaaagtgggaggcaactataattacctgtaccgactgttccgcaaaagcaacttgaaacctttcgagcgagatatatcaaccgaaatctaccaagctggttctacaccttgtaatggtgtggagggatttaactgctacttccctcttcagtcctatggatttcagcctacaaatggagtcgggtatcaaccctatagagtcgtggtgttgtcatttgaacttctccatgcacctgctactgtctgtggtccaaaaaagtccactaatcttgtaaaaaacaaatgcgtgaacttcaatttcaatggcctcaccggaacaggtgttttgacagaatctaacaaaaaattccttcccttccagcaattcgggagagat

SEQ ID NO: 1790 - DNA, 618 bp, synthetic construct
  source 1..618: mol_type = other DNA
gcagactatagcgtgctttacaattccgcatcctttagtaccttcaaatgttacggtgtgagccccaccaaactcaatgatctctgtttcacaaacgtgtacgcagatagtttcgttatacgcggggacgaagtacggcagatagcccctggccagacaggaaagatagccgattacaactacaaacttccagacgattttacagggtgtgtgatcgcttggaattcaaataacctggactccaaagtgggaggcaactataattacctgtaccgactgttccgcaaaagcaacttgaaacctttcgagcgagatatatcaaccgaaatctaccaagctggttctacaccttgtaatggtgtggagggatttaactgctacttccctcttcagtcctatggatttcagcctacaaatggagtcgggtatcaaccctatagagtcgtggtgttgtcatttgaacttctccatgcacctgctactgtctgtggtccaaaaaagtccactaatcttgtaaaaaacaaatgcgtgaacttcaatttcaatggcctcaccggaacaggtgttttgacagaatctaacaaaaaattccttcccttccagcaattcgggagagat

SEQ ID NO: 1791 - DNA, 615 bp, synthetic construct
  source 1..615: mol_type = other DNA
gactatagcgtgctttacaattccgcatcctttagtaccttcaaatgttacggtgtgagccccaccaaactcaatgatctctgtttcacaaacgtgtacgcagatagtttcgttatacgcggggacgaagtacggcagatagcccctggccagacaggaaagatagccgattacaactacaaacttccagacgattttacagggtgtgtgatcgcttggaattcaaataacctggactccaaagtgggaggcaactataattacctgtaccgactgttccgcaaaagcaacttgaaacctttcgagcgagatatatcaaccgaaatctaccaagctggttctacaccttgtaatggtgtggagggatttaactgctacttccctcttcagtcctatggatttcagcctacaaatggagtcgggtatcaaccctatagagtcgtggtgttgtcatttgaacttctccatgcacctgctactgtctgtggtccaaaaaagtccactaatcttgtaaaaaacaaatgcgtgaacttcaatttcaatggcctcaccggaacaggtgttttgacagaatctaacaaaaaattccttcccttccagcaattcgggagagat

SEQ ID NO: 1792 - DNA, 612 bp, synthetic construct
  source 1..612: mol_type = other DNA
tatagcgtgctttacaattccgcatcctttagtaccttcaaatgttacggtgtgagccccaccaaactcaatgatctctgtttcacaaacgtgtacgcagatagtttcgttatacgcggggacgaagtacggcagatagcccctggccagacaggaaagatagccgattacaactacaaacttccagacgattttacagggtgtgtgatcgcttggaattcaaataacctggactccaaagtgggaggcaactataattacctgtaccgactgttccgcaaaagcaacttgaaacctttcgagcgagatatatcaaccgaaatctaccaagctggttctacaccttgtaatggtgtggagggatttaactgctacttccctcttcagtcctatggatttcagcctacaaatggagtcgggtatcaaccctatagagtcgtggtgttgtcatttgaacttctccatgcacctgctactgtctgtggtccaaaaaagtccactaatcttgtaaaaaacaaatgcgtgaacttcaatttcaatggcctcaccggaacaggtgttttgacagaatctaacaaaaaattccttcccttccagcaattcgggagagat

SEQ ID NO: 1793 - DNA, 609 bp, synthetic construct
  source 1..609: mol_type = other DNA
agcgtgctttacaattccgcatcctttagtaccttcaaatgttacggtgtgagccccaccaaactcaatgatctctgtttcacaaacgtgtacgcagatagtttcgttatacgcggggacgaagtacggcagatagcccctggccagacaggaaagatagccgattacaactacaaacttccagacgattttacagggtgtgtgatcgcttggaattcaaataacctggactccaaagtgggaggcaactataattacctgtaccgactgttccgcaaaagcaacttgaaacctttcgagcgagatatatcaaccgaaatctaccaagctggttctacaccttgtaatggtgtggagggatttaactgctacttccctcttcagtcctatggatttcagcctacaaatggagtcgggtatcaaccctatagagtcgtggtgttgtcatttgaacttctccatgcacctgctactgtctgtggtccaaaaaagtccactaatcttgtaaaaaacaaatgcgtgaacttcaatttcaatggcctcaccggaacaggtgttttgacagaatctaacaaaaaattccttcccttccagcaattcgggagagat

SEQ ID NO: 1794 - DNA, 747 bp, synthetic construct
  source 1..747: mol_type = other DNA
agggttcagcccaccgaatcaatagtacggttcccaaatatcactaatctttgccccttcggggaagtatttaacgctactcgatttgctagcgtatatgcctggaaccggaagagaataagcaactgtgttgcagactatagcgtgctttacaattccgcatcctttagtaccttcaaatgttacggtgtgagccccaccaaactcaatgatctctgtttcacaaacgtgtacgcagatagtttcgttatacgcggggacgaagtacggcagatagcccctggccagacaggaaagatagccgattacaactacaaacttccagacgattttacagggtgtgtgatcgcttggaattcaaataacctggactccaaagtgggaggcaactataattacctgtaccgactgttccgcaaaagcaacttgaaacctttcgagcgagatatatcaaccgaaatctaccaagctggttctacaccttgtaatggtgtggagggatttaactgctacttccctcttcagtcctatggatttcagcctacaaatggagtcgggtatcaaccctatagagtcgtggtgttgtcatttgaacttctccatgcacctgctactgtctgtggtccaaaaaagtccactaatcttgtaaaaaacaaatgcgtgaacttcaatttcaatggcctcaccggaacaggtgttttgacagaatctaacaaaaaattccttcccttccagcaattcgggaga

SEQ ID NO: 1795 - DNA, 744 bp, synthetic construct
  source 1..744: mol_type = other DNA
agggttcagcccaccgaatcaatagtacggttcccaaatatcactaatctttgccccttcggggaagtatttaacgctactcgatttgctagcgtatatgcctggaaccggaagagaataagcaactgtgttgcagactatagcgtgctttacaattccgcatcctttagtaccttcaaatgttacggtgtgagccccaccaaactcaatgatctctgtttcacaaacgtgtacgcagatagtttcgttatacgcggggacgaagtacggcagatagcccctggccagacaggaaagatagccgattacaactacaaacttccagacgattttacagggtgtgtgatcgcttggaattcaaataacctggactccaaagtgggaggcaactataattacctgtaccgactgttccgcaaaagcaacttgaaacctttcgagcgagatatatcaaccgaaatctaccaagctggttctacaccttgtaatggtgtggagggatttaactgctacttccctcttcagtcctatggatttcagcctacaaatggagtcgggtatcaaccctatagagtcgtggtgttgtcatttgaacttctccatgcacctgctactgtctgtggtccaaaaaagtccactaatcttgtaaaaaacaaatgcgtgaacttcaatttcaatggcctcaccggaacaggtgttttgacagaatctaacaaaaaattccttcccttccagcaattcggg

SEQ ID NO: 1796 - DNA, 741 bp, synthetic construct
  source 1..741: mol_type = other DNA
agggttcagcccaccgaatcaatagtacggttcccaaatatcactaatctttgccccttcggggaagtatttaacgctactcgatttgctagcgtatatgcctggaaccggaagagaataagcaactgtgttgcagactatagcgtgctttacaattccgcatcctttagtaccttcaaatgttacggtgtgagccccaccaaactcaatgatctctgtttcacaaacgtgtacgcagatagtttcgttatacgcggggacgaagtacggcagatagcccctggccagacaggaaagatagccgattacaactacaaacttccagacgattttacagggtgtgtgatcgcttggaattcaaataacctggactccaaagtgggaggcaactataattacctgtaccgactgttccgcaaaagcaacttgaaacctttcgagcgagatatatcaaccgaaatctaccaagctggttctacaccttgtaatggtgtggagggatttaactgctacttccctcttcagtcctatggatttcagcctacaaatggagtcgggtatcaaccctatagagtcgtggtgttgtcatttgaacttctccatgcacctgctactgtctgtggtccaaaaaagtccactaatcttgtaaaaaacaaatgcgtgaacttcaatttcaatggcctcaccggaacaggtgttttgacagaatctaacaaaaaattccttcccttccagcaattc

SEQ ID NO: 1797 - DNA, 738 bp, synthetic construct
  source 1..738: mol_type = other DNA
agggttcagcccaccgaatcaatagtacggttcccaaatatcactaatctttgccccttcggggaagtatttaacgctactcgatttgctagcgtatatgcctggaaccggaagagaataagcaactgtgttgcagactatagcgtgctttacaattccgcatcctttagtaccttcaaatgttacggtgtgagccccaccaaactcaatgatctctgtttcacaaacgtgtacgcagatagtttcgttatacgcggggacgaagtacggcagatagcccctggccagacaggaaagatagccgattacaactacaaacttccagacgattttacagggtgtgtgatcgcttggaattcaaataacctggactccaaagtgggaggcaactataattacctgtaccgactgttccgcaaaagcaacttgaaacctttcgagcgagatatatcaaccgaaatctaccaagctggttctacaccttgtaatggtgtggagggatttaactgctacttccctcttcagtcctatggatttcagcctacaaatggagtcgggtatcaaccctatagagtcgtggtgttgtcatttgaacttctccatgcacctgctactgtctgtggtccaaaaaagtccactaatcttgtaaaaaacaaatgcgtgaacttcaatttcaatggcctcaccggaacaggtgttttgacagaatctaacaaaaaattccttcccttccagcaa

SEQ ID NO: 1798 - DNA, 735 bp, synthetic construct
  source 1..735: mol_type = other DNA
agggttcagcccaccgaatcaatagtacggttcccaaatatcactaatctttgccccttcggggaagtatttaacgctactcgatttgctagcgtatatgcctggaaccggaagagaataagcaactgtgttgcagactatagcgtgctttacaattccgcatcctttagtaccttcaaatgttacggtgtgagccccaccaaactcaatgatctctgtttcacaaacgtgtacgcagatagtttcgttatacgcggggacgaagtacggcagatagcccctggccagacaggaaagatagccgattacaactacaaacttccagacgattttacagggtgtgtgatcgcttggaattcaaataacctggactccaaagtgggaggcaactataattacctgtaccgactgttccgcaaaagcaacttgaaacctttcgagcgagatatatcaaccgaaatctaccaagctggttctacaccttgtaatggtgtggagggatttaactgctacttccctcttcagtcctatggatttcagcctacaaatggagtcgggtatcaaccctatagagtcgtggtgttgtcatttgaacttctccatgcacctgctactgtctgtggtccaaaaaagtccactaatcttgtaaaaaacaaatgcgtgaacttcaatttcaatggcctcaccggaacaggtgttttgacagaatctaacaaaaaattccttcccttccag

SEQ ID NO: 1799 - DNA, 732 bp, synthetic construct
  source 1..732: mol_type = other DNA
agggttcagcccaccgaatcaatagtacggttcccaaatatcactaatctttgccccttcggggaagtatttaacgctactcgatttgctagcgtatatgcctggaaccggaagagaataagcaactgtgttgcagactatagcgtgctttacaattccgcatcctttagtaccttcaaatgttacggtgtgagccccaccaaactcaatgatctctgtttcacaaacgtgtacgcagatagtttcgttatacgcggggacgaagtacggcagatagcccctggccagacaggaaagatagccgattacaactacaaacttccagacgattttacagggtgtgtgatcgcttggaattcaaataacctggactccaaagtgggaggcaactataattacctgtaccgactgttccgcaaaagcaacttgaaacctttcgagcgagatatatcaaccgaaatctaccaagctggttctacaccttgtaatggtgtggagggatttaactgctacttccctcttcagtcctatggatttcagcctacaaatggagtcgggtatcaaccctatagagtcgtggtgttgtcatttgaacttctccatgcacctgctactgtctgtggtccaaaaaagtccactaatcttgtaaaaaacaaatgcgtgaacttcaatttcaatggcctcaccggaacaggtgttttgacagaatctaacaaaaaattccttcccttc

SEQ ID NO: 1800 - DNA, 729 bp, synthetic construct
  source 1..729: mol_type = other DNA
agggttcagcccaccgaatcaatagtacggttcccaaatatcactaatctttgccccttcggggaagtatttaacgctactcgatttgctagcgtatatgcctggaaccggaagagaataagcaactgtgttgcagactatagcgtgctttacaattccgcatcctttagtaccttcaaatgttacggtgtgagccccaccaaactcaatgatctctgtttcacaaacgtgtacgcagatagtttcgttatacgcggggacgaagtacggcagatagcccctggccagacaggaaagatagccgattacaactacaaacttccagacgattttacagggtgtgtgatcgcttggaattcaaataacctggactccaaagtgggaggcaactataattacctgtaccgactgttccgcaaaagcaacttgaaacctttcgagcgagatatatcaaccgaaatctaccaagctggttctacaccttgtaatggtgtggagggatttaactgctacttccctcttcagtcctatggatttcagcctacaaatggagtcgggtatcaaccctatagagtcgtggtgttgtcatttgaacttctccatgcacctgctactgtctgtggtccaaaaaagtccactaatcttgtaaaaaacaaatgcgtgaacttcaatttcaatggcctcaccggaacaggtgttttgacagaatctaacaaaaaattccttccc

SEQ ID NO: 1801 - DNA, 726 bp, synthetic construct
  source 1..726: mol_type = other DNA
agggttcagcccaccgaatcaatagtacggttcccaaatatcactaatctttgccccttcggggaagtatttaacgctactcgatttgctagcgtatatgcctggaaccggaagagaataagcaactgtgttgcagactatagcgtgctttacaattccgcatcctttagtaccttcaaatgttacggtgtgagccccaccaaactcaatgatctctgtttcacaaacgtgtacgcagatagtttcgttatacgcggggacgaagtacggcagatagcccctggccagacaggaaagatagccgattacaactacaaacttccagacgattttacagggtgtgtgatcgcttggaattcaaataacctggactccaaagtgggaggcaactataattacctgtaccgactgttccgcaaaagcaacttgaaacctttcgagcgagatatatcaaccgaaatctaccaagctggttctacaccttgtaatggtgtggagggatttaactgctacttccctcttcagtcctatggatttcagcctacaaatggagtcgggtatcaaccctatagagtcgtggtgttgtcatttgaacttctccatgcacctgctactgtctgtggtccaaaaaagtccactaatcttgtaaaaaacaaatgcgtgaacttcaatttcaatggcctcaccggaacaggtgttttgacagaatctaacaaaaaattcctt

SEQ ID NO: 1802 - DNA, 723 bp, synthetic construct
  source 1..723: mol_type = other DNA
agggttcagcccaccgaatcaatagtacggttcccaaatatcactaatctttgccccttcggggaagtatttaacgctactcgatttgctagcgtatatgcctggaaccggaagagaataagcaactgtgttgcagactatagcgtgctttacaattccgcatcctttagtaccttcaaatgttacggtgtgagccccaccaaactcaatgatctctgtttcacaaacgtgtacgcagatagtttcgttatacgcggggacgaagtacggcagatagcccctggccagacaggaaagatagccgattacaactacaaacttccagacgattttacagggtgtgtgatcgcttggaattcaaataacctggactccaaagtgggaggcaactataattacctgtaccgactgttccgcaaaagcaacttgaaacctttcgagcgagatatatcaaccgaaatctaccaagctggttctacaccttgtaatggtgtggagggatttaactgctacttccctcttcagtcctatggatttcagcctacaaatggagtcgggtatcaaccctatagagtcgtggtgttgtcatttgaacttctccatgcacctgctactgtctgtggtccaaaaaagtccactaatcttgtaaaaaacaaatgcgtgaacttcaatttcaatggcctcaccggaacaggtgttttgacagaatctaacaaaaaattc

SEQ ID NO: 1803 - DNA, 720 bp, synthetic construct
  source 1..720: mol_type = other DNA
agggttcagcccaccgaatcaatagtacggttcccaaatatcactaatctttgccccttcggggaagtatttaacgctactcgatttgctagcgtatatgcctggaaccggaagagaataagcaactgtgttgcagactatagcgtgctttacaattccgcatcctttagtaccttcaaatgttacggtgtgagccccaccaaactcaatgatctctgtttcacaaacgtgtacgcagatagtttcgttatacgcggggacgaagtacggcagatagcccctggccagacaggaaagatagccgattacaactacaaacttccagacgattttacagggtgtgtgatcgcttggaattcaaataacctggactccaaagtgggaggcaactataattacctgtaccgactgttccgcaaaagcaacttgaaacctttcgagcgagatatatcaaccgaaatctaccaagctggttctacaccttgtaatggtgtggagggatttaactgctacttccctcttcagtcctatggatttcagcctacaaatggagtcgggtatcaaccctatagagtcgtggtgttgtcatttgaacttctccatgcacctgctactgtctgtggtccaaaaaagtccactaatcttgtaaaaaacaaatgcgtgaacttcaatttcaatggcctcaccggaacaggtgttttgacagaatctaacaaaaaa

SEQ ID NO: 1804 - DNA, 717 bp, synthetic construct
  source 1..717: mol_type = other DNA
agggttcagcccaccgaatcaatagtacggttcccaaatatcactaatctttgccccttcggggaagtatttaacgctactcgatttgctagcgtatatgcctggaaccggaagagaataagcaactgtgttgcagactatagcgtgctttacaattccgcatcctttagtaccttcaaatgttacggtgtgagccccaccaaactcaatgatctctgtttcacaaacgtgtacgcagatagtttcgttatacgcggggacgaagtacggcagatagcccctggccagacaggaaagatagccgattacaactacaaacttccagacgattttacagggtgtgtgatcgcttggaattcaaataacctggactccaaagtgggaggcaactataattacctgtaccgactgttccgcaaaagcaacttgaaacctttcgagcgagatatatcaaccgaaatctaccaagctggttctacaccttgtaatggtgtggagggatttaactgctacttccctcttcagtcctatggatttcagcctacaaatggagtcgggtatcaaccctatagagtcgtggtgttgtcatttgaacttctccatgcacctgctactgtctgtggtccaaaaaagtccactaatcttgtaaaaaacaaatgcgtgaacttcaatttcaatggcctcaccggaacaggtgttttgacagaatctaacaaa

SEQ ID NO: 1805 - DNA, 714 bp, synthetic construct
  source 1..714: mol_type = other DNA
agggttcagcccaccgaatcaatagtacggttcccaaatatcactaatctttgccccttcggggaagtatttaacgctactcgatttgctagcgtatatgcctggaaccggaagagaataagcaactgtgttgcagactatagcgtgctttacaattccgcatcctttagtaccttcaaatgttacggtgtgagccccaccaaactcaatgatctctgtttcacaaacgtgtacgcagatagtttcgttatacgcggggacgaagtacggcagatagcccctggccagacaggaaagatagccgattacaactacaaacttccagacgattttacagggtgtgtgatcgcttggaattcaaataacctggactccaaagtgggaggcaactataattacctgtaccgactgttccgcaaaagcaacttgaaacctttcgagcgagatatatcaaccgaaatctaccaagctggttctacaccttgtaatggtgtggagggatttaactgctacttccctcttcagtcctatggatttcagcctacaaatggagtcgggtatcaaccctatagagtcgtggtgttgtcatttgaacttctccatgcacctgctactgtctgtggtccaaaaaagtccactaatcttgtaaaaaacaaatgcgtgaacttcaatttcaatggcctcaccggaacaggtgttttgacagaatctaac

SEQ ID NO: 1806 - DNA, 711 bp, synthetic construct; identical to SEQ ID NO: 38
  source 1..711: mol_type = other DNA

SEQ ID NO: 1807 - DNA, 708 bp, synthetic construct
  source 1..708: mol_type = other DNA
agggttcagcccaccgaatcaatagtacggttcccaaatatcactaatctttgccccttcggggaagtatttaacgctactcgatttgctagcgtatatgcctggaaccggaagagaataagcaactgtgttgcagactatagcgtgctttacaattccgcatcctttagtaccttcaaatgttacggtgtgagccccaccaaactcaatgatctctgtttcacaaacgtgtacgcagatagtttcgttatacgcggggacgaagtacggcagatagcccctggccagacaggaaagatagccgattacaactacaaacttccagacgattttacagggtgtgtgatcgcttggaattcaaataacctggactccaaagtgggaggcaactataattacctgtaccgactgttccgcaaaagcaacttgaaacctttcgagcgagatatatcaaccgaaatctaccaagctggttctacaccttgtaatggtgtggagggatttaactgctacttccctcttcagtcctatggatttcagcctacaaatggagtcgggtatcaaccctatagagtcgtggtgttgtcatttgaacttctccatgcacctgctactgtctgtggtccaaaaaagtccactaatcttgtaaaaaacaaatgcgtgaacttcaatttcaatggcctcaccggaacaggtgttttgacagaa

SEQ ID NO: 1808 - DNA, 705 bp, synthetic construct
  source 1..705: mol_type = other DNA
agggttcagcccaccgaatcaatagtacggttcccaaatatcactaatctttgccccttcggggaagtatttaacgctactcgatttgctagcgtatatgcctggaaccggaagagaataagcaactgtgttgcagactatagcgtgctttacaattccgcatcctttagtaccttcaaatgttacggtgtgagccccaccaaactcaatgatctctgtttcacaaacgtgtacgcagatagtttcgttatacgcggggacgaagtacggcagatagcccctggccagacaggaaagatagccgattacaactacaaacttccagacgattttacagggtgtgtgatcgcttggaattcaaataacctggactccaaagtgggaggcaactataattacctgtaccgactgttccgcaaaagcaacttgaaacctttcgagcgagatatatcaaccgaaatctaccaagctggttctacaccttgtaatggtgtggagggatttaactgctacttccctcttcagtcctatggatttcagcctacaaatggagtcgggtatcaaccctatagagtcgtggtgttgtcatttgaacttctccatgcacctgctactgtctgtggtccaaaaaagtccactaatcttgtaaaaaacaaatgcgtgaacttcaatttcaatggcctcaccggaacaggtgttttgaca

SEQ ID NO: 1809 - DNA, 702 bp, synthetic construct
  source 1..702: mol_type = other DNA
agggttcagcccaccgaatcaatagtacggttcccaaatatcactaatctttgccccttcggggaagtatttaacgctactcgatttgctagcgtatatgcctggaaccggaagagaataagcaactgtgttgcagactatagcgtgctttacaattccgcatcctttagtaccttcaaatgttacggtgtgagccccaccaaactcaatgatctctgtttcacaaacgtgtacgcagatagtttcgttatacgcggggacgaagtacggcagatagcccctggccagacaggaaagatagccgattacaactacaaacttccagacgattttacagggtgtgtgatcgcttggaattcaaataacctggactccaaagtgggaggcaactataattacctgtaccgactgttccgcaaaagcaacttgaaacctttcgagcgagatatatcaaccgaaatctaccaagctggttctacaccttgtaatggtgtggagggatttaactgctacttccctcttcagtcctatggatttcagcctacaaatggagtcgggtatcaaccctatagagtcgtggtgttgtcatttgaacttctccatgcacctgctactgtctgtggtccaaaaaagtccactaatcttgtaaaaaacaaatgcgtgaacttcaatttcaatggcctcaccggaacaggtgttttg

SEQ ID NO: 1810 - DNA, 699 bp, synthetic construct
  source 1..699: mol_type = other DNA
agggttcagcccaccgaatcaatagtacggttcccaaatatcactaatctttgccccttcggggaagtatttaacgctactcgatttgctagcgtatatgcctggaaccggaagagaataagcaactgtgttgcagactatagcgtgctttacaattccgcatcctttagtaccttcaaatgttacggtgtgagccccaccaaactcaatgatctctgtttcacaaacgtgtacgcagatagtttcgttatacgcggggacgaagtacggcagatagcccctggccagacaggaaagatagccgattacaactacaaacttccagacgattttacagggtgtgtgatcgcttggaattcaaataacctggactccaaagtgggaggcaactataattacctgtaccgactgttccgcaaaagcaacttgaaacctttcgagcgagatatatcaaccgaaatctaccaagctggttctacaccttgtaatggtgtggagggatttaactgctacttccctcttcagtcctatggatttcagcctacaaatggagtcgggtatcaaccctatagagtcgtggtgttgtcatttgaacttctccatgcacctgctactgtctgtggtccaaaaaagtccactaatcttgtaaaaaacaaatgcgtgaacttcaatttcaatggcctcaccggaacaggtgtt

SEQ ID NO: 1811 - DNA, 696 bp, synthetic construct
  source 1..696: mol_type = other DNA
agggttcagcccaccgaatcaatagtacggttcccaaatatcactaatctttgccccttcggggaagtatttaacgctactcgatttgctagcgtatatgcctggaaccggaagagaataagcaactgtgttgcagactatagcgtgctttacaattccgcatcctttagtaccttcaaatgttacggtgtgagccccaccaaactcaatgatctctgtttcacaaacgtgtacgcagatagtttcgttatacgcggggacgaagtacggcagatagcccctggccagacaggaaagatagccgattacaactacaaacttccagacgattttacagggtgtgtgatcgcttggaattcaaataacctggactccaaagtgggaggcaactataattacctgtaccgactgttccgcaaaagcaacttgaaacctttcgagcgagatatatcaaccgaaatctaccaagctggttctacaccttgtaatggtgtggagggatttaactgctacttccctcttcagtcctatggatttcagcctacaaatggagtcgggtatcaaccctatagagtcgtggtgttgtcatttgaacttctccatgcacctgctactgtctgtggtccaaaaaagtccactaatcttgtaaaaaacaaatgcgtgaacttcaatttcaatggcctcaccggaacaggt

SEQ ID NO: 1812 - DNA, 693 bp, synthetic construct
  source 1..693: mol_type = other DNA
agggttcagcccaccgaatcaatagtacggttcccaaatatcactaatctttgccccttcggggaagtatttaacgctactcgatttgctagcgtatatgcctggaaccggaagagaataagcaactgtgttgcagactatagcgtgctttacaattccgcatcctttagtaccttcaaatgttacggtgtgagccccaccaaactcaatgatctctgtttcacaaacgtgtacgcagatagtttcgttatacgcggggacgaagtacggcagatagcccctggccagacaggaaagatagccgattacaactacaaacttccagacgattttacagggtgtgtgatcgcttggaattcaaataacctggactccaaagtgggaggcaactataattacctgtaccgactgttccgcaaaagcaacttgaaacctttcgagcgagatatatcaaccgaaatctaccaagctggttctacaccttgtaatggtgtggagggatttaactgctacttccctcttcagtcctatggatttcagcctacaaatggagtcgggtatcaaccctatagagtcgtggtgttgtcatttgaacttctccatgcacctgctactgtctgtggtccaaaaaagtccactaatcttgtaaaaaacaaatgcgtgaacttcaatttcaatggcctcaccggaaca

SEQ ID NO: 1813 - DNA, 690 bp, synthetic construct
  source 1..690: mol_type = other DNA
agggttcagcccaccgaatcaatagtacggttcccaaatatcactaatctttgccccttcggggaagtatttaacgctactcgatttgctagcgtatatgcctggaaccggaagagaataagcaactgtgttgcagactatagcgtgctttacaattccgcatcctttagtaccttcaaatgttacggtgtgagccccaccaaactcaatgatctctgtttcacaaacgtgtacgcagatagtttcgttatacgcggggacgaagtacggcagatagcccctggccagacaggaaagatagccgattacaactacaaacttccagacgattttacagggtgtgtgatcgcttggaattcaaataacctggactccaaagtgggaggcaactataattacctgtaccgactgttccgcaaaagcaacttgaaacctttcgagcgagatatatcaaccgaaatctaccaagctggttctacaccttgtaatggtgtggagggatttaactgctacttccctcttcagtcctatggatttcagcctacaaatggagtcgggtatcaaccctatagagtcgtggtgttgtcatttgaacttctccatgcacctgctactgtctgtggtccaaaaaagtccactaatcttgtaaaaaacaaatgcgtgaacttcaatttcaatggcctcaccgga

SEQ ID NO: 1814 - DNA, 687 bp, synthetic construct
  source 1..687: mol_type = other DNA
agggttcagcccaccgaatcaatagtacggttcccaaatatcactaatctttgccccttcggggaagtatttaacgctactcgatttgctagcgtatatgcctggaaccggaagagaataagcaactgtgttgcagactatagcgtgctttacaattccgcatcctttagtaccttcaaatgttacggtgtgagccccaccaaactcaatgatctctgtttcacaaacgtgtacgcagatagtttcgttatacgcggggacgaagtacggcagatagcccctggccagacaggaaagatagccgattacaactacaaacttccagacgattttacagggtgtgtgatcgcttggaattcaaataacctggactccaaagtgggaggcaactataattacctgtaccgactgttccgcaaaagcaacttgaaacctttcgagcgagatatatcaaccgaaatctaccaagctggttctacaccttgtaatggtgtggagggatttaactgctacttccctcttcagtcctatggatttcagcctacaaatggagtcgggtatcaaccctatagagtcgtggtgttgtcatttgaacttctccatgcacctgctactgtctgtggtccaaaaaagtccactaatcttgtaaaaaacaaatgcgtgaacttcaatttcaatggcctcacc

SEQ ID NO: 1815 - DNA, 684 bp, synthetic construct
  source 1..684: mol_type = other DNA
agggttcagcccaccgaatcaatagtacggttcccaaatatcactaatctttgccccttcggggaagtatttaacgctactcgatttgctagcgtatatgcctggaaccggaagagaataagcaactgtgttgcagactatagcgtgctttacaattccgcatcctttagtaccttcaaatgttacggtgtgagccccaccaaactcaatgatctctgtttcacaaacgtgtacgcagatagtttcgttatacgcggggacgaagtacggcagatagcccctggccagacaggaaagatagccgattacaactacaaacttccagacgattttacagggtgtgtgatcgcttggaattcaaataacctggactccaaagtgggaggcaactataattacctgtaccgactgttccgcaaaagcaacttgaaacctttcgagcgagatatatcaaccgaaatctaccaagctggttctacaccttgtaatggtgtggagggatttaactgctacttccctcttcagtcctatggatttcagcctacaaatggagtcgggtatcaaccctatagagtcgtggtgttgtcatttgaacttctccatgcacctgctactgtctgtggtccaaaaaagtccactaatcttgtaaaaaacaaatgcgtgaacttcaatttcaatggcctc

SEQ ID NO: 1816 - DNA, 681 bp, synthetic construct
  source 1..681: mol_type = other DNA
agggttcagcccaccgaatcaatagtacggttcccaaatatcactaatctttgccccttcggggaagtatttaacgctactcgatttgctagcgtatatgcctggaaccggaagagaataagcaactgtgttgcagactatagcgtgctttacaattccgcatcctttagtaccttcaaatgttacggtgtgagccccaccaaactcaatgatctctgtttcacaaacgtgtacgcagatagtttcgttatacgcggggacgaagtacggcagatagcccctggccagacaggaaagatagccgattacaactacaaacttccagacgattttacagggtgtgtgatcgcttggaattcaaataacctggactccaaagtgggaggcaactataattacctgtaccgactgttccgcaaaagcaacttgaaacctttcgagcgagatatatcaaccgaaatctaccaagctggttctacaccttgtaatggtgtggagggatttaactgctacttccctcttcagtcctatggatttcagcctacaaatggagtcgggtatcaaccctatagagtcgtggtgttgtcatttgaacttctccatgcacctgctactgtctgtggtccaaaaaagtccactaatcttgtaaaaaacaaatgcgtgaacttcaatttcaatggc

SEQ ID NO: 1817 - DNA, 678 bp, synthetic construct
  source 1..678: mol_type = other DNA
agggttcagcccaccgaatcaatagtacggttcccaaatatcactaatctttgccccttcggggaagtatttaacgctactcgatttgctagcgtatatgcctggaaccggaagagaataagcaactgtgttgcagactatagcgtgctttacaattccgcatcctttagtaccttcaaatgttacggtgtgagccccaccaaactcaatgatctctgtttcacaaacgtgtacgcagatagtttcgttatacgcggggacgaagtacggcagatagcccctggccagacaggaaagatagccgattacaactacaaacttccagacgattttacagggtgtgtgatcgcttggaattcaaataacctggactccaaagtgggaggcaactataattacctgtaccgactgttccgcaaaagcaacttgaaacctttcgagcgagatatatcaaccgaaatctaccaagctggttctacaccttgtaatggtgtggagggatttaactgctacttccctcttcagtcctatggatttcagcctacaaatggagtcgggtatcaaccctatagagtcgtggtgttgtcatttgaacttctccatgcacctgctactgtctgtggtccaaaaaagtccactaatcttgtaaaaaacaaatgcgtgaacttcaatttcaat

SEQ ID NO: 1818 - DNA, 675 bp, synthetic construct
  source 1..675: mol_type = other DNA
agggttcagcccaccgaatcaatagtacggttcccaaatatcactaatctttgccccttcggggaagtatttaacgctactcgatttgctagcgtatatgcctggaaccggaagagaataagcaactgtgttgcagactatagcgtgctttacaattccgcatcctttagtaccttcaaatgttacggtgtgagccccaccaaactcaatgatctctgtttcacaaacgtgtacgcagatagtttcgttatacgcggggacgaagtacggcagatagcccctggccagacaggaaagatagccgattacaactacaaacttccagacgattttacagggtgtgtgatcgcttggaattcaaataacctggactccaaagtgggaggcaactataattacctgtaccgactgttccgcaaaagcaacttgaaacctttcgagcgagatatatcaaccgaaatctaccaagctggttctacaccttgtaatggtgtggagggatttaactgctacttccctcttcagtcctatggatttcagcctacaaatggagtcgggtatcaaccctatagagtcgtggtgttgtcatttgaacttctccatgcacctgctactgtctgtggtccaaaaaagtccactaatcttgtaaaaaacaaatgcgtgaacttcaatttc

SEQ ID NO: 1819 - DNA, 672 bp, synthetic construct
  source 1..672: mol_type = other DNA
agggttcagcccaccgaatcaatagtacggttcccaaatatcactaatctttgccccttcggggaagtatttaacgctactcgatttgctagcgtatatgcctggaaccggaagagaataagcaactgtgttgcagactatagcgtgctttacaattccgcatcctttagtaccttcaaatgttacggtgtgagccccaccaaactcaatgatctctgtttcacaaacgtgtacgcagatagtttcgttatacgcggggacgaagtacggcagatagcccctggccagacaggaaagatagccgattacaactacaaacttccagacgattttacagggtgtgtgatcgcttggaattcaaataacctggactccaaagtgggaggcaactataattacctgtaccgactgttccgcaaaagcaacttgaaacctttcgagcgagatatatcaaccgaaatctaccaagctggttctacaccttgtaatggtgtggagggatttaactgctacttccctcttcagtcctatggatttcagcctacaaatggagtcgggtatcaaccctatagagtcgtggtgttgtcatttgaacttctccatgcacctgctactgtctgtggtccaaaaaagtccactaatcttgtaaaaaacaaatgcgtgaacttcaat

SEQ ID NO: 1820 - DNA, 669 bp, synthetic construct
  source 1..669: mol_type = other DNA
agggttcagcccaccgaatcaatagtacggttcccaaatatcactaatctttgccccttcggggaagtatttaacgctactcgatttgctagcgtatatgcctggaaccggaagagaataagcaactgtgttgcagactatagcgtgctttacaattccgcatcctttagtaccttcaaatgttacggtgtgagccccaccaaactcaatgatctctgtttcacaaacgtgtacgcagatagtttcgttatacgcggggacgaagtacggcagatagcccctggccagacaggaaagatagccgattacaactacaaacttccagacgattttacagggtgtgtgatcgcttggaattcaaataacctggactccaaagtgggaggcaactataattacctgtaccgactgttccgcaaaagcaacttgaaacctttcgagcgagatatatcaaccgaaatctaccaagctggttctacaccttgtaatggtgtggagggatttaactgctacttccctcttcagtcctatggatttcagcctacaaatggagtcgggtatcaaccctatagagtcgtggtgttgtcatttgaacttctccatgcacctgctactgtctgtggtccaaaaaagtccactaatcttgtaaaaaacaaatgcgtgaacttc

SEQ ID NO: 1821 - DNA, 666 bp, synthetic construct
  source 1..666: mol_type = other DNA
agggttcagcccaccgaatcaatagtacggttcccaaatatcactaatctttgccccttcggggaagtatttaacgctactcgatttgctagcgtatatgcctggaaccggaagagaataagcaactgtgttgcagactatagcgtgctttacaattccgcatcctttagtaccttcaaatgttacggtgtgagccccaccaaactcaatgatctctgtttcacaaacgtgtacgcagatagtttcgttatacgcggggacgaagtacggcagatagcccctggccagacaggaaagatagccgattacaactacaaacttccagacgattttacagggtgtgtgatcgcttggaattcaaataacctggactccaaagtgggaggcaactataattacctgtaccgactgttccgcaaaagcaacttgaaacctttcgagcgagatatatcaaccgaaatctaccaagctggttctacaccttgtaatggtgtggagggatttaactgctacttccctcttcagtcctatggatttcagcctacaaatggagtcgggtatcaaccctatagagtcgtggtgttgtcatttgaacttctccatgcacctgctactgtctgtggtccaaaaaagtccactaatcttgtaaaaaacaaatgcgtgaac

SEQ ID NO: 1822 - DNA, 663 bp, synthetic construct
  source 1..663: mol_type = other DNA
agggttcagcccaccgaatcaatagtacggttcccaaatatcactaatctttgccccttcggggaagtatttaacgctactcgatttgctagcgtatatgcctggaaccggaagagaataagcaactgtgttgcagactatagcgtgctttacaattccgcatcctttagtaccttcaaatgttacggtgtgagccccaccaaactcaatgatctctgtttcacaaacgtgtacgcagatagtttcgttatacgcggggacgaagtacggcagatagcccctggccagacaggaaagatagccgattacaactacaaacttccagacgattttacagggtgtgtgatcgcttggaattcaaataacctggactccaaagtgggaggcaactataattacctgtaccgactgttccgcaaaagcaacttgaaacctttcgagcgagatatatcaaccgaaatctaccaagctggttctacaccttgtaatggtgtggagggatttaactgctacttccctcttcagtcctatggatttcagcctacaaatggagtcgggtatcaaccctatagagtcgtggtgttgtcatttgaacttctccatgcacctgctactgtctgtggtccaaaaaagtccactaatcttgtaaaaaacaaatgcgtg

SEQ ID NO: 1823 - DNA, 660 bp, synthetic construct
  source 1..660: mol_type = other DNA
agggttcagcccaccgaatcaatagtacggttcccaaatatcactaatctttgccccttcggggaagtatttaacgctactcgatttgctagcgtatatgcctggaaccggaagagaataagcaactgtgttgcagactatagcgtgctttacaattccgcatcctttagtaccttcaaatgttacggtgtgagccccaccaaactcaatgatctctgtttcacaaacgtgtacgcagatagtttcgttatacgcggggacgaagtacggcagatagcccctggccagacaggaaagatagccgattacaactacaaacttccagacgattttacagggtgtgtgatcgcttggaattcaaataacctggactccaaagtgggaggcaactataattacctgtaccgactgttccgcaaaagcaacttgaaacctttcgagcgagatatatcaaccgaaatctaccaagctggttctacaccttgtaatggtgtggagggatttaactgctacttccctcttcagtcctatggatttcagcctacaaatggagtcgggtatcaaccctatagagtcgtggtgttgtcatttgaacttctccatgcacctgctactgtctgtggtccaaaaaagtccactaatcttgtaaaaaacaaatgc

SEQ ID NO: 1824 - DNA, 657 bp, synthetic construct
  source 1..657: mol_type = other DNA
agggttcagcccaccgaatcaatagtacggttcccaaatatcactaatctttgccccttcggggaagtatttaacgctactcgatttgctagcgtatatgcctggaaccggaagagaataagcaactgtgttgcagactatagcgtgctttacaattccgcatcctttagtaccttcaaatgttacggtgtgagccccaccaaactcaatgatctctgtttcacaaacgtgtacgcagatagtttcgttatacgcggggacgaagtacggcagatagcccctggccagacaggaaagatagccgattacaactacaaacttccagacgattttacagggtgtgtgatcgcttggaattcaaataacctggactccaaagtgggaggcaactataattacctgtaccgactgttccgcaaaagcaacttgaaacctttcgagcgagatatatcaaccgaaatctaccaagctggttctacaccttgtaatggtgtggagggatttaactgctacttccctcttcagtcctatggatttcagcctacaaatggagtcgggtatcaaccctatagagtcgtggtgttgtcatttgaacttctccatgcacctgctactgtctgtggtccaaaaaagtccactaatcttgtaaaaaacaaa

SEQ ID NO: 1825 - DNA, 654 bp, synthetic construct
  source 1..654: mol_type = other DNA
agggttcagcccaccgaatcaatagtacggttcccaaatatcactaatctttgccccttcggggaagtatttaacgctactcgatttgctagcgtatatgcctggaaccggaagagaataagcaactgtgttgcagactatagcgtgctttacaattccgcatcctttagtaccttcaaatgttacggtgtgagccccaccaaactcaatgatctctgtttcacaaacgtgtacgcagatagtttcgttatacgcggggacgaagtacggcagatagcccctggccagacaggaaagatagccgattacaactacaaacttccagacgattttacagggtgtgtgatcgcttggaattcaaataacctggactccaaagtgggaggcaactataattacctgtaccgactgttccgcaaaagcaacttgaaacctttcgagcgagatatatcaaccgaaatctaccaagctggttctacaccttgtaatggtgtggagggatttaactgctacttccctcttcagtcctatggatttcagcctacaaatggagtcgggtatcaaccctatagagtcgtggtgttgtcatttgaacttctccatgcacctgctactgtctgtggtccaaaaaagtccactaatcttgtaaaaaac

SEQ ID NO: 1826 - DNA, 651 bp, synthetic construct
  source 1..651: mol_type = other DNA
agggttcagcccaccgaatcaatagtacggttcccaaatatcactaatctttgccccttcggggaagtatttaacgctactcgatttgctagcgtatatgcctggaaccggaagagaataagcaactgtgttgcagactatagcgtgctttacaattccgcatcctttagtaccttcaaatgttacggtgtgagccccaccaaactcaatgatctctgtttcacaaacgtgtacgcagatagtttcgttatacgcggggacgaagtacggcagatagcccctggccagacaggaaagatagccgattacaactacaaacttccagacgattttacagggtgtgtgatcgcttggaattcaaataacctggactccaaagtgggaggcaactataattacctgtaccgactgttccgcaaaagcaacttgaaacctttcgagcgagatatatcaaccgaaatctaccaagctggttctacaccttgtaatggtgtggagggatttaactgctacttccctcttcagtcctatggatttcagcctacaaatggagtcgggtatcaaccctatagagtcgtggtgttgtcatttgaacttctccatgcacctgctactgtctgtggtccaaaaaagtccactaatcttgtaaaa

SEQ ID NO: 1827 - DNA, 648 bp, synthetic construct
  source 1..648: mol_type = other DNA
agggttcagcccaccgaatcaatagtacggttcccaaatatcactaatctttgccccttcggggaagtatttaacgctactcgatttgctagcgtatatgcctggaaccggaagagaataagcaactgtgttgcagactatagcgtgctttacaattccgcatcctttagtaccttcaaatgttacggtgtgagccccaccaaactcaatgatctctgtttcacaaacgtgtacgcagatagtttcgttatacgcggggacgaagtacggcagatagcccctggccagacaggaaagatagccgattacaactacaaacttccagacgattttacagggtgtgtgatcgcttggaattcaaataacctggactccaaagtgggaggcaactataattacctgtaccgactgttccgcaaaagcaacttgaaacctttcgagcgagatatatcaaccgaaatctaccaagctggttctacaccttgtaatggtgtggagggatttaactgctacttccctcttcagtcctatggatttcagcctacaaatggagtcgggtatcaaccctatagagtcgtggtgttgtcatttgaacttctccatgcacctgctactgtctgtggtccaaaaaagtccactaatcttgta

SEQ ID NO: 1828 - DNA, 645 bp, synthetic construct
  source 1..645: mol_type = other DNA
agggttcagcccaccgaatcaatagtacggttcccaaatatcactaatctttgccccttcggggaagtatttaacgctactcgatttgctagcgtatatgcctggaaccggaagagaataagcaactgtgttgcagactatagcgtgctttacaattccgcatcctttagtaccttcaaatgttacggtgtgagccccaccaaactcaatgatctctgtttcacaaacgtgtacgcagatagtttcgttatacgcggggacgaagtacggcagatagcccctggccagacaggaaagatagccgattacaactacaaacttccagacgattttacagggtgtgtgatcgcttggaattcaaataacctggactccaaagtgggaggcaactataattacctgtaccgactgttccgcaaaagcaacttgaaacctttcgagcgagatatatcaaccgaaatctaccaagctggttctacaccttgtaatggtgtggagggatttaactgctacttccctcttcagtcctatggatttcagcctacaaatggagtcgggtatcaaccctatagagtcgtggtgttgtcatttgaacttctccatgcacctgctactgtctgtggtccaaaaaagtccactaatctt

SEQ ID NO: 1829 - DNA, 642 bp, synthetic construct
  source 1..642: mol_type = other DNA
agggttcagcccaccgaatcaatagtacggttcccaaatatcactaatctttgccccttcggggaagtatttaacgctactcgatttgctagcgtatatgcctggaaccggaagagaataagcaactgtgttgcagactatagcgtgctttacaattccgcatcctttagtaccttcaaatgttacggtgtgagccccaccaaactcaatgatctctgtttcacaaacgtgtacgcagatagtttcgttatacgcggggacgaagtacggcagatagcccctggccagacaggaaagatagccgattacaactacaaacttccagacgattttacagggtgtgtgatcgcttggaattcaaataacctggactccaaagtgggaggcaactataattacctgtaccgactgttccgcaaaagcaacttgaaacctttcgagcgagatatatcaaccgaaatctaccaagctggttctacaccttgtaatggtgtggagggatttaactgctacttccctcttcagtcctatggatttcagcctacaaatggagtcgggtatcaaccctatagagtcgtggtgttgtcatttgaacttctccatgcacctgctactgtctgtggtccaaaaaagtccactaat

SEQ ID NO: 1830 - DNA, 639 bp, synthetic construct
  source 1..639: mol_type = other DNA
agggttcagcccaccgaatcaatagtacggttcccaaatatcactaatctttgccccttcggggaagtatttaacgctactcgatttgctagcgtatatgcctggaaccggaagagaataagcaactgtgttgcagactatagcgtgctttacaattccgcatcctttagtaccttcaaatgttacggtgtgagccccaccaaactcaatgatctctgtttcacaaacgtgtacgcagatagtttcgttatacgcggggacgaagtacggcagatagcccctggccagacaggaaagatagccgattacaactacaaacttccagacgattttacagggtgtgtgatcgcttggaattcaaataacctggactccaaagtgggaggcaactataattacctgtaccgactgttccgcaaaagcaacttgaaacctttcgagcgagatatatcaaccgaaatctaccaagctggttctacaccttgtaatggtgtggagggatttaactgctacttccctcttcagtcctatggatttcagcctacaaatggagtcgggtatcaaccctatagagtcgtggtgttgtcatttgaacttctccatgcacctgctactgtctgtggtccaaaaaagtccact

SEQ ID NO: 1831 - DNA, 636 bp, synthetic construct
  source 1..636: mol_type = other DNA
agggttcagcccaccgaatcaatagtacggttcccaaatatcactaatctttgccccttcggggaagtatttaacgctactcgatttgctagcgtatatgcctggaaccggaagagaataagcaactgtgttgcagactatagcgtgctttacaattccgcatcctttagtaccttcaaatgttacggtgtgagccccaccaaactcaatgatctctgtttcacaaacgtgtacgcagatagtttcgttatacgcggggacgaagtacggcagatagcccctggccagacaggaaagatagccgattacaactacaaacttccagacgattttacagggtgtgtgatcgcttggaattcaaataacctggactccaaagtgggaggcaactataattacctgtaccgactgttccgcaaaagcaacttgaaacctttcgagcgagatatatcaaccgaaatctaccaagctggttctacaccttgtaatggtgtggagggatttaactgctacttccctcttcagtcctatggatttcagcctacaaatggagtcgggtatcaaccctatagagtcgtggtgttgtcatttgaacttctccatgcacctgctactgtctgtggtccaaaaaagtcc

SEQ ID NO: 1832 - DNA, 1467 bp, synthetic construct
  source 1..1467: mol_type = other DNA
gttcagcccaccgaatcaatagtacggttcccaaatatcactaatctttgccccttcggggaagtatttaacgctactcgatttgctagcgtatatgcctggaaccggaagagaataagcaactgtgttgcagactatagcgtgctttacaattccgcatcctttagtaccttcaaatgttacggtgtgagccccaccaaactcaatgatctctgtttcacaaacgtgtacgcagatagtttcgttatacgcggggacgaagtacggcagatagcccctggccagacaggaaagatagccgattacaactacaaacttccagacgattttacagggtgtgtgatcgcttggaattcaaataacctggactccaaagtgggaggcaactataattacctgtaccgactgttccgcaaaagcaacttgaaacctttcgagcgagatatatcaaccgaaatctaccaagctggttctacaccttgtaatggtgtggagggatttaactgctacttccctcttcagtcctatggatttcagcctacaaatggagtcgggtatcaaccctatagagtcgtggtgttgtcatttgaacttctccatgcacctgctactgtctgtggtccaaaaaagtccactaatcttgtaaaaaacaaatgcgtgaacttcaatttcaatggcctcaccggaacaggtgttttgacagaatctaacaaaaaattccttcccttccagcaattcgggagagatggatccggcggcggcggtgacggtggtggcggctccggagacaagacccacacctgccccccttgtcctgcccctgagctgctgggcggaccctccgtgtttctgttcccccccaagcccaaggacaccctgatgatcagccggacccccgaggtcacctgcgtggtggtggacgtcagccacgaggacccagaggtcaagttcaattggtatgtggacggcgtggaggtgcacaacgccaagaccaagccccgggaggaacagtacaacagcacctaccgggtggtgtccgtgctgaccgtgctgcaccaggactggctgaacggcaaagaatacaagtgcaaggtgtccaacaaggccctgcctgcccccatcgagaaaaccatcagcaaggccaagggccagcccagagaaccccaggtgtacaccctgccccctagcagggaagagctgaccaagaaccaggtgtccctgacctgtctggtcaagggcttctaccccagcgatatcgccgtggagtgggagagcaacggccagcctgagaacaactacaagaccaccccccctgtgctggacagcgacggcagcttcttcctgtacagcaagctgaccgtggacaagagccggtggcagcagggcaacgtgtttagctgcagcgtgatgcacgaggccctgcacaaccactacacccagaagagcttaagcctgtcccctggcagt

SEQ ID NO: 1833 - DNA, 1464 bp, synthetic construct
  source 1..1464: mol_type = other DNA
cagcccaccgaatcaatagtacggttcccaaatatcactaatctttgccccttcggggaagtatttaacgctactcgatttgctagcgtatatgcctggaaccggaagagaataagcaactgtgttgcagactatagcgtgctttacaattccgcatcctttagtaccttcaaatgttacggtgtgagccccaccaaactcaatgatctctgtttcacaaacgtgtacgcagatagtttcgttatacgcggggacgaagtacggcagatagcccctggccagacaggaaagatagccgattacaactacaaacttccagacgattttacagggtgtgtgatcgcttggaattcaaataacctggactccaaagtgggaggcaactataattacctgtaccgactgttccgcaaaagcaacttgaaacctttcgagcgagatatatcaaccgaaatctaccaagctggttctacaccttgtaatggtgtggagggatttaactgctacttccctcttcagtcctatggatttcagcctacaaatggagtcgggtatcaaccctatagagtcgtggtgttgtcatttgaacttctccatgcacctgctactgtctgtggtccaaaaaagtccactaatcttgtaaaaaacaaatgcgtgaacttcaatttcaatggcctcaccggaacaggtgttttgacagaatctaacaaaaaattccttcccttccagcaattcgggagagatggatccggcggcggcggtgacggtggtggcggctccggagacaagacccacacctgccccccttgtcctgcccctgagctgctgggcggaccctccgtgtttctgttcccccccaagcccaaggacaccctgatgatcagccggacccccgaggtcacctgcgtggtggtggacgtcagccacgaggacccagaggtcaagttcaattggtatgtggacggcgtggaggtgcacaacgccaagaccaagccccgggaggaacagtacaacagcacctaccgggtggtgtccgtgctgaccgtgctgcaccaggactggctgaacggcaaagaatacaagtgcaaggtgtccaacaaggccctgcctgcccccatcgagaaaaccatcagcaaggccaagggccagcccagagaaccccaggtgtacaccctgccccctagcagggaagagctgaccaagaaccaggtgtccctgacctgtctggtcaagggcttctaccccagcgatatcgccgtggagtgggagagcaacggccagcctgagaacaactacaagaccaccccccctgtgctggacagcgacggcagcttcttcctgtacagcaagctgaccgtggacaagagccggtggcagcagggcaacgtgtttagctgcagcgtgatgcacgaggccctgcacaaccactacacccagaagagcttaagcctgtcccctggcagt

SEQ ID NO: 1834 - DNA, 1461 bp, synthetic construct
  source 1..1461: mol_type = other DNA
cccaccgaatcaatagtacggttcccaaatatcactaatctttgccccttcggggaagtatttaacgctactcgatttgctagcgtatatgcctggaaccggaagagaataagcaactgtgttgcagactatagcgtgctttacaattccgcatcctttagtaccttcaaatgttacggtgtgagccccaccaaactcaatgatctctgtttcacaaacgtgtacgcagatagtttcgttatacgcggggacgaagtacggcagatagcccctggccagacaggaaagatagccgattacaactacaaacttccagacgattttacagggtgtgtgatcgcttggaattcaaataacctggactccaaagtgggaggcaactataattacctgtaccgactgttccgcaaaagcaacttgaaacctttcgagcgagatatatcaaccgaaatctaccaagctggttctacaccttgtaatggtgtggagggatttaactgctacttccctcttcagtcctatggatttcagcctacaaatggagtcgggtatcaaccctatagagtcgtggtgttgtcatttgaacttctccatgcacctgctactgtctgtggtccaaaaaagtccactaatcttgtaaaaaacaaatgcgtgaacttcaatttcaatggcctcaccggaacaggtgttttgacagaatctaacaaaaaattccttcccttccagcaattcgggagagatggatccggcggcggcggtgacggtggtggcggctccggagacaagacccacacctgccccccttgtcctgcccctgagctgctgggcggaccctccgtgtttctgttcccccccaagcccaaggacaccctgatgatcagccggacccccgaggtcacctgcgtggtggtggacgtcagccacgaggacccagaggtcaagttcaattggtatgtggacggcgtggaggtgcacaacgccaagaccaagccccgggaggaacagtacaacagcacctaccgggtggtgtccgtgctgaccgtgctgcaccaggactggctgaacggcaaagaatacaagtgcaaggtgtccaacaaggccctgcctgcccccatcgagaaaaccatcagcaaggccaagggccagcccagagaaccccaggtgtacaccctgccccctagcagggaagagctgaccaagaaccaggtgtccctgacctgtctggtcaagggcttctaccccagcgatatcgccgtggagtgggagagcaacggccagcctgagaacaactacaagaccaccccccctgtgctggacagcgacggcagcttcttcctgtacagcaagctgaccgtggacaagagccggtggcagcagggcaacgtgtttagctgcagcgtgatgcacgaggccctgcacaaccactacacccagaagagcttaagcctgtcccctggcagt

SEQ ID NO: 1835 - DNA, 1458 bp, synthetic construct
  source 1..1458: mol_type = other DNA
accgaatcaatagtacggttcccaaatatcactaatctttgccccttcggggaagtatttaacgctactcgatttgctagcgtatatgcctggaaccggaagagaataagcaactgtgttgcagactatagcgtgctttacaattccgcatcctttagtaccttcaaatgttacggtgtgagccccaccaaactcaatgatctctgtttcacaaacgtgtacgcagatagtttcgttatacgcggggacgaagtacggcagatagcccctggccagacaggaaagatagccgattacaactacaaacttccagacgattttacagggtgtgtgatcgcttggaattcaaataacctggactccaaagtgggaggcaactataattacctgtaccgactgttccgcaaaagcaacttgaaacctttcgagcgagatatatcaaccgaaatctaccaagctggttctacaccttgtaatggtgtggagggatttaactgctacttccctcttcagtcctatggatttcagcctacaaatggagtcgggtatcaaccctatagagtcgtggtgttgtcatttgaacttctccatgcacctgctactgtctgtggtccaaaaaagtccactaatcttgtaaaaaacaaatgcgtgaacttcaatttcaatggcctcaccggaacaggtgttttgacagaatctaacaaaaaattccttcccttccagcaattcgggagagatggatccggcggcggcggtgacggtggtggcggctccggagacaagacccacacctgccccccttgtcctgcccctgagctgctgggcggaccctccgtgtttctgttcccccccaagcccaaggacaccctgatgatcagccggacccccgaggtcacctgcgtggtggtggacgtcagccacgaggacccagaggtcaagttcaattggtatgtggacggcgtggaggtgcacaacgccaagaccaagccccgggaggaacagtacaacagcacctaccgggtggtgtccgtgctgaccgtgctgcaccaggactggctgaacggcaaagaatacaagtgcaaggtgtccaacaaggccctgcctgcccccatcgagaaaaccatcagcaaggccaagggccagcccagagaaccccaggtgtacaccctgccccctagcagggaagagctgaccaagaaccaggtgtccctgacctgtctggtcaagggcttctaccccagcgatatcgccgtggagtgggagagcaacggccagcctgagaacaactacaagaccaccccccctgtgctggacagcgacggcagcttcttcctgtacagcaagctgaccgtggacaagagccggtggcagcagggcaacgtgtttagctgcagcgtgatgcacgaggccctgcacaaccactacacccagaagagcttaagcctgtcccctggcagt

SEQ ID NO: 1836 - DNA, 1455 bp, synthetic construct
  source 1..1455: mol_type = other DNA
gaatcaatagtacggttcccaaatatcactaatctttgccccttcggggaagtatttaacgctactcgatttgctagcgtatatgcctggaaccggaagagaataagcaactgtgttgcagactatagcgtgctttacaattccgcatcctttagtaccttcaaatgttacggtgtgagccccaccaaactcaatgatctctgtttcacaaacgtgtacgcagatagtttcgttatacgcggggacgaagtacggcagatagcccctggccagacaggaaagatagccgattacaactacaaacttccagacgattttacagggtgtgtgatcgcttggaattcaaataacctggactccaaagtgggaggcaactataattacctgtaccgactgttccgcaaaagcaacttgaaacctttcgagcgagatatatcaaccgaaatctaccaagctggttctacaccttgtaatggtgtggagggatttaactgctacttccctcttcagtcctatggatttcagcctacaaatggagtcgggtatcaaccctatagagtcgtggtgttgtcatttgaacttctccatgcacctgctactgtctgtggtccaaaaaagtccactaatcttgtaaaaaacaaatgcgtgaacttcaatttcaatggcctcaccggaacaggtgttttgacagaatctaacaaaaaattccttcccttccagcaattcgggagagatggatccggcggcggcggtgacggtggtggcggctccggagacaagacccacacctgccccccttgtcctgcccctgagctgctgggcggaccctccgtgtttctgttcccccccaagcccaaggacaccctgatgatcagccggacccccgaggtcacctgcgtggtggtggacgtcagccacgaggacccagaggtcaagttcaattggtatgtggacggcgtggaggtgcacaacgccaagaccaagccccgggaggaacagtacaacagcacctaccgggtggtgtccgtgctgaccgtgctgcaccaggactggctgaacggcaaagaatacaagtgcaaggtgtccaacaaggccctgcctgcccccatcgagaaaaccatcagcaaggccaagggccagcccagagaaccccaggtgtacaccctgccccctagcagggaagagctgaccaagaaccaggtgtccctgacctgtctggtcaagggcttctaccccagcgatatcgccgtggagtgggagagcaacggccagcctgagaacaactacaagaccaccccccctgtgctggacagcgacggcagcttcttcctgtacagcaagctgaccgtggacaagagccggtggcagcagggcaacgtgtttagctgcagcgtgatgcacgaggccctgcacaaccactacacccagaagagcttaagcctgtcccctggcagt

SEQ ID NO: 1837 - DNA, 1452 bp, synthetic construct
  source 1..1452: mol_type = other DNA
tcaatagtacggttcccaaatatcactaatctttgccccttcggggaagtatttaacgctactcgatttgctagcgtatatgcctggaaccggaagagaataagcaactgtgttgcagactatagcgtgctttacaattccgcatcctttagtaccttcaaatgttacggtgtgagccccaccaaactcaatgatctctgtttcacaaacgtgtacgcagatagtttcgttatacgcggggacgaagtacggcagatagcccctggccagacaggaaagatagccgattacaactacaaacttccagacgattttacagggtgtgtgatcgcttggaattcaaataacctggactccaaagtgggaggcaactataattacctgtaccgactgttccgcaaaagcaacttgaaacctttcgagcgagatatatcaaccgaaatctaccaagctggttctacaccttgtaatggtgtggagggatttaactgctacttccctcttcagtcctatggatttcagcctacaaatggagtcgggtatcaaccctatagagtcgtggtgttgtcatttgaacttctccatgcacctgctactgtctgtggtccaaaaaagtccactaatcttgtaaaaaacaaatgcgtgaacttcaatttcaatggcctcaccggaacaggtgttttgacagaatctaacaaaaaattccttcccttccagcaattcgggagagatggatccggcggcggcggtgacggtggtggcggctccggagacaagacccacacctgccccccttgtcctgcccctgagctgctgggcggaccctccgtgtttctgttcccccccaagcccaaggacaccctgatgatcagccggacccccgaggtcacctgcgtggtggtggacgtcagccacgaggacccagaggtcaagttcaattggtatgtggacggcgtggaggtgcacaacgccaagaccaagccccgggaggaacagtacaacagcacctaccgggtggtgtccgtgctgaccgtgctgcaccaggactggctgaacggcaaagaatacaagtgcaaggtgtccaacaaggccctgcctgcccccatcgagaaaaccatcagcaaggccaagggccagcccagagaaccccaggtgtacaccctgccccctagcagggaagagctgaccaagaaccaggtgtccctgacctgtctggtcaagggcttctaccccagcgatatcgccgtggagtgggagagcaacggccagcctgagaacaactacaagaccaccccccctgtgctggacagcgacggcagcttcttcctgtacagcaagctgaccgtggacaagagccggtggcagcagggcaacgtgtttagctgcagcgtgatgcacgaggccctgcacaaccactacacccagaagagcttaagcctgtcccctggcagt

SEQ ID NO: 1838 - DNA, 1449 bp, synthetic construct
  source 1..1449: mol_type = other DNA
atagtacggttcccaaatatcactaatctttgccccttcggggaagtatttaacgctactcgatttgctagcgtatatgcctggaaccggaagagaataagcaactgtgttgcagactatagcgtgctttacaattccgcatcctttagtaccttcaaatgttacggtgtgagccccaccaaactcaatgatctctgtttcacaaacgtgtacgcagatagtttcgttatacgcggggacgaagtacggcagatagcccctggccagacaggaaagatagccgattacaactacaaacttccagacgattttacagggtgtgtgatcgcttggaattcaaataacctggactccaaagtgggaggcaactataattacctgtaccgactgttccgcaaaagcaacttgaaacctttcgagcgagatatatcaaccgaaatctaccaagctggttctacaccttgtaatggtgtggagggatttaactgctacttccctcttcagtcctatggatttcagcctacaaatggagtcgggtatcaaccctatagagtcgtggtgttgtcatttgaacttctccatgcacctgctactgtctgtggtccaaaaaagtccactaatcttgtaaaaaacaaatgcgtgaacttcaatttcaatggcctcaccggaacaggtgttttgacagaatctaacaaaaaattccttcccttccagcaattcgggagagatggatccggcggcggcggtgacggtggtggcggctccggagacaagacccacacctgccccccttgtcctgcccctgagctgctgggcggaccctccgtgtttctgttcccccccaagcccaaggacaccctgatgatcagccggacccccgaggtcacctgcgtggtggtggacgtcagccacgaggacccagaggtcaagttcaattggtatgtggacggcgtggaggtgcacaacgccaagaccaagccccgggaggaacagtacaacagcacctaccgggtggtgtccgtgctgaccgtgctgcaccaggactggctgaacggcaaagaatacaagtgcaaggtgtccaacaaggccctgcctgcccccatcgagaaaaccatcagcaaggccaagggccagcccagagaaccccaggtgtacaccctgccccctagcagggaagagctgaccaagaaccaggtgtccctgacctgtctggtcaagggcttctaccccagcgatatcgccgtggagtgggagagcaacggccagcctgagaacaactacaagaccaccccccctgtgctggacagcgacggcagcttcttcctgtacagcaagctgaccgtggacaagagccggtggcagcagggcaacgtgtttagctgcagcgtgatgcacgaggccctgcacaaccactacacccagaagagcttaagcctgtcccctggcagt

SEQ ID NO: 1839 - DNA, 1446 bp, synthetic construct
  source 1..1446: mol_type = other DNA
gtacggttcccaaatatcactaatctttgccccttcggggaagtatttaacgctactcgatttgctagcgtatatgcctggaaccggaagagaataagcaactgtgttgcagactatagcgtgctttacaattccgcatcctttagtaccttcaaatgttacggtgtgagccccaccaaactcaatgatctctgtttcacaaacgtgtacgcagatagtttcgttatacgcggggacgaagtacggcagatagcccctggccagacaggaaagatagccgattacaactacaaacttccagacgattttacagggtgtgtgatcgcttggaattcaaataacctggactccaaagtgggaggcaactataattacctgtaccgactgttccgcaaaagcaacttgaaacctttcgagcgagatatatcaaccgaaatctaccaagctggttctacaccttgtaatggtgtggagggatttaactgctacttccctcttcagtcctatggatttcagcctacaaatggagtcgggtatcaaccctatagagtcgtggtgttgtcatttgaacttctccatgcacctgctactgtctgtggtccaaaaaagtccactaatcttgtaaaaaacaaatgcgtgaacttcaatttcaatggcctcaccggaacaggtgttttgacagaatctaacaaaaaattccttcccttccagcaattcgggagagatggatccggcggcggcggtgacggtggtggcggctccggagacaagacccacacctgccccccttgtcctgcccctgagctgctgggcggaccctccgtgtttctgttcccccccaagcccaaggacaccctgatgatcagccggacccccgaggtcacctgcgtggtggtggacgtcagccacgaggacccagaggtcaagttcaattggtatgtggacggcgtggaggtgcacaacgccaagaccaagccccgggaggaacagtacaacagcacctaccgggtggtgtccgtgctgaccgtgctgcaccaggactggctgaacggcaaagaatacaagtgcaaggtgtccaacaaggccctgcctgcccccatcgagaaaaccatcagcaaggccaagggccagcccagagaaccccaggtgtacaccctgccccctagcagggaagagctgaccaagaaccaggtgtccctgacctgtctggtcaagggcttctaccccagcgatatcgccgtggagtgggagagcaacggccagcctgagaacaactacaagaccaccccccctgtgctggacagcgacggcagcttcttcctgtacagcaagctgaccgtggacaagagccggtggcagcagggcaacgtgtttagctgcagcgtgatgcacgaggccctgcacaaccactacacccagaagagcttaagcctgtcccctggcagt

SEQ ID NO: 1840 - DNA, 1443 bp, synthetic construct
  source 1..1443: mol_type = other DNA
cggttcccaaatatcactaatctttgccccttcggggaagtatttaacgctactcgatttgctagcgtatatgcctggaaccggaagagaataagcaactgtgttgcagactatagcgtgctttacaattccgcatcctttagtaccttcaaatgttacggtgtgagccccaccaaactcaatgatctctgtttcacaaacgtgtacgcagatagtttcgttatacgcggggacgaagtacggcagatagcccctggccagacaggaaagatagccgattacaactacaaacttccagacgattttacagggtgtgtgatcgcttggaattcaaataacctggactccaaagtgggaggcaactataattacctgtaccgactgttccgcaaaagcaacttgaaacctttcgagcgagatatatcaaccgaaatctaccaagctggttctacaccttgtaatggtgtggagggatttaactgctacttccctcttcagtcctatggatttcagcctacaaatggagtcgggtatcaaccctatagagtcgtggtgttgtcatttgaacttctccatgcacctgctactgtctgtggtccaaaaaagtccactaatcttgtaaaaaacaaatgcgtgaacttcaatttcaatggcctcaccggaacaggtgttttgacagaatctaacaaaaaattccttcccttccagcaattcgggagagatggatccggcggcggcggtgacggtggtggcggctccggagacaagacccacacctgccccccttgtcctgcccctgagctgctgggcggaccctccgtgtttctgttcccccccaagcccaaggacaccctgatgatcagccggacccccgaggtcacctgcgtggtggtggacgtcagccacgaggacccagaggtcaagttcaattggtatgtggacggcgtggaggtgcacaacgccaagaccaagccccgggaggaacagtacaacagcacctaccgggtggtgtccgtgctgaccgtgctgcaccaggactggctgaacggcaaagaatacaagtgcaaggtgtccaacaaggccctgcctgcccccatcgagaaaaccatcagcaaggccaagggccagcccagagaaccccaggtgtacaccctgccccctagcagggaagagctgaccaagaaccaggtgtccctgacctgtctggtcaagggcttctaccccagcgatatcgccgtggagtgggagagcaacggccagcctgagaacaactacaagaccaccccccctgtgctggacagcgacggcagcttcttcctgtacagcaagctgaccgtggacaagagccggtggcagcagggcaacgtgtttagctgcagcgtgatgcacgaggccctgcacaaccactacacccagaagagcttaagcctgtcccctggcagt

SEQ ID NO: 1841 - DNA, 1440 bp, synthetic construct
  source 1..1440: mol_type = other DNA
ttcccaaatatcactaatctttgccccttcggggaagtatttaacgctactcgatttgctagcgtatatgcctggaaccggaagagaataagcaactgtgttgcagactatagcgtgctttacaattccgcatcctttagtaccttcaaatgttacggtgtgagccccaccaaactcaatgatctctgtttcacaaacgtgtacgcagatagtttcgttatacgcggggacgaagtacggcagatagcccctggccagacaggaaagatagccgattacaactacaaacttccagacgattttacagggtgtgtgatcgcttggaattcaaataacctggactccaaagtgggaggcaactataattacctgtaccgactgttccgcaaaagcaacttgaaacctttcgagcgagatatatcaaccgaaatctaccaagctggttctacaccttgtaatggtgtggagggatttaactgctacttccctcttcagtcctatggatttcagcctacaaatggagtcgggtatcaaccctatagagtcgtggtgttgtcatttgaacttctccatgcacctgctactgtctgtggtccaaaaaagtccactaatcttgtaaaaaacaaatgcgtgaacttcaatttcaatggcctcaccggaacaggtgttttgacagaatctaacaaaaaattccttcccttccagcaattcgggagagatggatccggcggcggcggtgacggtggtggcggctccggagacaagacccacacctgccccccttgtcctgcccctgagctgctgggcggaccctccgtgtttctgttcccccccaagcccaaggacaccctgatgatcagccggacccccgaggtcacctgcgtggtggtggacgtcagccacgaggacccagaggtcaagttcaattggtatgtggacggcgtggaggtgcacaacgccaagaccaagccccgggaggaacagtacaacagcacctaccgggtggtgtccgtgctgaccgtgctgcaccaggactggctgaacggcaaagaatacaagtgcaaggtgtccaacaaggccctgcctgcccccatcgagaaaaccatcagcaaggccaagggccagcccagagaaccccaggtgtacaccctgccccctagcagggaagagctgaccaagaaccaggtgtccctgacctgtctggtcaagggcttctaccccagcgatatcgccgtggagtgggagagcaacggccagcctgagaacaactacaagaccaccccccctgtgctggacagcgacggcagcttcttcctgtacagcaagctgaccgtggacaagagccggtggcagcagggcaacgtgtttagctgcagcgtgatgcacgaggccctgcacaaccactacacccagaagagcttaagcctgtcccctggcagt

SEQ ID NO: 1842 - DNA, 1437 bp, synthetic construct
  source 1..1437: mol_type = other DNA
ccaaatatcactaatctttgccccttcggggaagtatttaacgctactcgatttgctagcgtatatgcctggaaccggaagagaataagcaactgtgttgcagactatagcgtgctttacaattccgcatcctttagtaccttcaaatgttacggtgtgagccccaccaaactcaatgatctctgtttcacaaacgtgtacgcagatagtttcgttatacgcggggacgaagtacggcagatagcccctggccagacaggaaagatagccgattacaactacaaacttccagacgattttacagggtgtgtgatcgcttggaattcaaataacctggactccaaagtgggaggcaactataattacctgtaccgactgttccgcaaaagcaacttgaaacctttcgagcgagatatatcaaccgaaatctaccaagctggttctacaccttgtaatggtgtggagggatttaactgctacttccctcttcagtcctatggatttcagcctacaaatggagtcgggtatcaaccctatagagtcgtggtgttgtcatttgaacttctccatgcacctgctactgtctgtggtccaaaaaagtccactaatcttgtaaaaaacaaatgcgtgaacttcaatttcaatggcctcaccggaacaggtgttttgacagaatctaacaaaaaattccttcccttccagcaattcgggagagatggatccggcggcggcggtgacggtggtggcggctccggagacaagacccacacctgccccccttgtcctgcccctgagctgctgggcggaccctccgtgtttctgttcccccccaagcccaaggacaccctgatgatcagccggacccccgaggtcacctgcgtggtggtggacgtcagccacgaggacccagaggtcaagttcaattggtatgtggacggcgtggaggtgcacaacgccaagaccaagccccgggaggaacagtacaacagcacctaccgggtggtgtccgtgctgaccgtgctgcaccaggactggctgaacggcaaagaatacaagtgcaaggtgtccaacaaggccctgcctgcccccatcgagaaaaccatcagcaaggccaagggccagcccagagaaccccaggtgtacaccctgccccctagcagggaagagctgaccaagaaccaggtgtccctgacctgtctggtcaagggcttctaccccagcgatatcgccgtggagtgggagagcaacggccagcctgagaacaactacaagaccaccccccctgtgctggacagcgacggcagcttcttcctgtacagcaagctgaccgtggacaagagccggtggcagcagggcaacgtgtttagctgcagcgtgatgcacgaggccctgcacaaccactacacccagaagagcttaagcctgtcccctggcagt

SEQ ID NO: 1843 - DNA, 1434 bp, synthetic construct
  source 1..1434: mol_type = other DNA
aatatcactaatctttgccccttcggggaagtatttaacgctactcgatttgctagcgtatatgcctggaaccggaagagaataagcaactgtgttgcagactatagcgtgctttacaattccgcatcctttagtaccttcaaatgttacggtgtgagccccaccaaactcaatgatctctgtttcacaaacgtgtacgcagatagtttcgttatacgcggggacgaagtacggcagatagcccctggccagacaggaaagatagccgattacaactacaaacttccagacgattttacagggtgtgtgatcgcttggaattcaaataacctggactccaaagtgggaggcaactataattacctgtaccgactgttccgcaaaagcaacttgaaacctttcgagcgagatatatcaaccgaaatctaccaagctggttctacaccttgtaatggtgtggagggatttaactgctacttccctcttcagtcctatggatttcagcctacaaatggagtcgggtatcaaccctatagagtcgtggtgttgtcatttgaacttctccatgcacctgctactgtctgtggtccaaaaaagtccactaatcttgtaaaaaacaaatgcgtgaacttcaatttcaatggcctcaccggaacaggtgttttgacagaatctaacaaaaaattccttcccttccagcaattcgggagagatggatccggcggcggcggtgacggtggtggcggctccggagacaagacccacacctgccccccttgtcctgcccctgagctgctgggcggaccctccgtgtttctgttcccccccaagcccaaggacaccctgatgatcagccggacccccgaggtcacctgcgtggtggtggacgtcagccacgaggacccagaggtcaagttcaattggtatgtggacggcgtggaggtgcacaacgccaagaccaagccccgggaggaacagtacaacagcacctaccgggtggtgtccgtgctgaccgtgctgcaccaggactggctgaacggcaaagaatacaagtgcaaggtgtccaacaaggccctgcctgcccccatcgagaaaaccatcagcaaggccaagggccagcccagagaaccccaggtgtacaccctgccccctagcagggaagagctgaccaagaaccaggtgtccctgacctgtctggtcaagggcttctaccccagcgatatcgccgtggagtgggagagcaacggccagcctgagaacaactacaagaccaccccccctgtgctggacagcgacggcagcttcttcctgtacagcaagctgaccgtggacaagagccggtggcagcagggcaacgtgtttagctgcagcgtgatgcacgaggccctgcacaaccactacacccagaagagcttaagcctgtcccctggcagt

SEQ ID NO: 1844 - DNA, 1431 bp, synthetic construct
  source 1..1431: mol_type = other DNA
atcactaatctttgccccttcggggaagtatttaacgctactcgatttgctagcgtatatgcctggaaccggaagagaataagcaactgtgttgcagactatagcgtgctttacaattccgcatcctttagtaccttcaaatgttacggtgtgagccccaccaaactcaatgatctctgtttcacaaacgtgtacgcagatagtttcgttatacgcggggacgaagtacggcagatagcccctggccagacaggaaagatagccgattacaactacaaacttccagacgattttacagggtgtgtgatcgcttggaattcaaataacctggactccaaagtgggaggcaactataattacctgtaccgactgttccgcaaaagcaacttgaaacctttcgagcgagatatatcaaccgaaatctaccaagctggttctacaccttgtaatggtgtggagggatttaactgctacttccctcttcagtcctatggatttcagcctacaaatggagtcgggtatcaaccctatagagtcgtggtgttgtcatttgaacttctccatgcacctgctactgtctgtggtccaaaaaagtccactaatcttgtaaaaaacaaatgcgtgaacttcaatttcaatggcctcaccggaacaggtgttttgacagaatctaacaaaaaattccttcccttccagcaattcgggagagatggatccggcggcggcggtgacggtggtggcggctccggagacaagacccacacctgccccccttgtcctgcccctgagctgctgggcggaccctccgtgtttctgttcccccccaagcccaaggacaccctgatgatcagccggacccccgaggtcacctgcgtggtggtggacgtcagccacgaggacccagaggtcaagttcaattggtatgtggacggcgtggaggtgcacaacgccaagaccaagccccgggaggaacagtacaacagcacctaccgggtggtgtccgtgctgaccgtgctgcaccaggactggctgaacggcaaagaatacaagtgcaaggtgtccaacaaggccctgcctgcccccatcgagaaaaccatcagcaaggccaagggccagcccagagaaccccaggtgtacaccctgccccctagcagggaagagctgaccaagaaccaggtgtccctgacctgtctggtcaagggcttctaccccagcgatatcgccgtggagtgggagagcaacggccagcctgagaacaactacaagaccaccccccctgtgctggacagcgacggcagcttcttcctgtacagcaagctgaccgtggacaagagccggtggcagcagggcaacgtgtttagctgcagcgtgatgcacgaggccctgcacaaccactacacccagaagagcttaagcctgtcccctggcagt

SEQ ID NO: 1845 - DNA, 1428 bp, synthetic construct
  source 1..1428: mol_type = other DNA
actaatctttgccccttcggggaagtatttaacgctactcgatttgctagcgtatatgcctggaaccggaagagaataagcaactgtgttgcagactatagcgtgctttacaattccgcatcctttagtaccttcaaatgttacggtgtgagccccaccaaactcaatgatctctgtttcacaaacgtgtacgcagatagtttcgttatacgcggggacgaagtacggcagatagcccctggccagacaggaaagatagccgattacaactacaaacttccagacgattttacagggtgtgtgatcgcttggaattcaaataacctggactccaaagtgggaggcaactataattacctgtaccgactgttccgcaaaagcaacttgaaacctttcgagcgagatatatcaaccgaaatctaccaagctggttctacaccttgtaatggtgtggagggatttaactgctacttccctcttcagtcctatggatttcagcctacaaatggagtcgggtatcaaccctatagagtcgtggtgttgtcatttgaacttctccatgcacctgctactgtctgtggtccaaaaaagtccactaatcttgtaaaaaacaaatgcgtgaacttcaatttcaatggcctcaccggaacaggtgttttgacagaatctaacaaaaaattccttcccttccagcaattcgggagagatggatccggcggcggcggtgacggtggtggcggctccggagacaagacccacacctgccccccttgtcctgcccctgagctgctgggcggaccctccgtgtttctgttcccccccaagcccaaggacaccctgatgatcagccggacccccgaggtcacctgcgtggtggtggacgtcagccacgaggacccagaggtcaagttcaattggtatgtggacggcgtggaggtgcacaacgccaagaccaagccccgggaggaacagtacaacagcacctaccgggtggtgtccgtgctgaccgtgctgcaccaggactggctgaacggcaaagaatacaagtgcaaggtgtccaacaaggccctgcctgcccccatcgagaaaaccatcagcaaggccaagggccagcccagagaaccccaggtgtacaccctgccccctagcagggaagagctgaccaagaaccaggtgtccctgacctgtctggtcaagggcttctaccccagcgatatcgccgtggagtgggagagcaacggccagcctgagaacaactacaagaccaccccccctgtgctggacagcgacggcagcttcttcctgtacagcaagctgaccgtggacaagagccggtggcagcagggcaacgtgtttagctgcagcgtgatgcacgaggccctgcacaaccactacacccagaagagcttaagcctgtcccctggcagt

SEQ ID NO: 1846 - DNA, 1425 bp, synthetic construct
  source 1..1425: mol_type = other DNA
aatctttgccccttcggggaagtatttaacgctactcgatttgctagcgtatatgcctggaaccggaagagaataagcaactgtgttgcagactatagcgtgctttacaattccgcatcctttagtaccttcaaatgttacggtgtgagccccaccaaactcaatgatctctgtttcacaaacgtgtacgcagatagtttcgttatacgcggggacgaagtacggcagatagcccctggccagacaggaaagatagccgattacaactacaaacttccagacgattttacagggtgtgtgatcgcttggaattcaaataacctggactccaaagtgggaggcaactataattacctgtaccgactgttccgcaaaagcaacttgaaacctttcgagcgagatatatcaaccgaaatctaccaagctggttctacaccttgtaatggtgtggagggatttaactgctacttccctcttcagtcctatggatttcagcctacaaatggagtcgggtatcaaccctatagagtcgtggtgttgtcatttgaacttctccatgcacctgctactgtctgtggtccaaaaaagtccactaatcttgtaaaaaacaaatgcgtgaacttcaatttcaatggcctcaccggaacaggtgttttgacagaatctaacaaaaaattccttcccttccagcaattcgggagagatggatccggcggcggcggtgacggtggtggcggctccggagacaagacccacacctgccccccttgtcctgcccctgagctgctgggcggaccctccgtgtttctgttcccccccaagcccaaggacaccctgatgatcagccggacccccgaggtcacctgcgtggtggtggacgtcagccacgaggacccagaggtcaagttcaattggtatgtggacggcgtggaggtgcacaacgccaagaccaagccccgggaggaacagtacaacagcacctaccgggtggtgtccgtgctgaccgtgctgcaccaggactggctgaacggcaaagaatacaagtgcaaggtgtccaacaaggccctgcctgcccccatcgagaaaaccatcagcaaggccaagggccagcccagagaaccccaggtgtacaccctgccccctagcagggaagagctgaccaagaaccaggtgtccctgacctgtctggtcaagggcttctaccccagcgatatcgccgtggagtgggagagcaacggccagcctgagaacaactacaagaccaccccccctgtgctggacagcgacggcagcttcttcctgtacagcaagctgaccgtggacaagagccggtggcagcagggcaacgtgtttagctgcagcgtgatgcacgaggccctgcacaaccactacacccagaagagcttaagcctgtcccctggcagt

SEQ ID NO: 1847 - DNA, 1422 bp, synthetic construct
  source 1..1422: mol_type = other DNA
ctttgccccttcggggaagtatttaacgctactcgatttgctagcgtatatgcctggaaccggaagagaataagcaactgtgttgcagactatagcgtgctttacaattccgcatcctttagtaccttcaaatgttacggtgtgagccccaccaaactcaatgatctctgtttcacaaacgtgtacgcagatagtttcgttatacgcggggacgaagtacggcagatagcccctggccagacaggaaagatagccgattacaactacaaacttccagacgattttacagggtgtgtgatcgcttggaattcaaataacctggactccaaagtgggaggcaactataattacctgtaccgactgttccgcaaaagcaacttgaaacctttcgagcgagatatatcaaccgaaatctaccaagctggttctacaccttgtaatggtgtggagggatttaactgctacttccctcttcagtcctatggatttcagcctacaaatggagtcgggtatcaaccctatagagtcgtggtgttgtcatttgaacttctccatgcacctgctactgtctgtggtccaaaaaagtccactaatcttgtaaaaaacaaatgcgtgaacttcaatttcaatggcctcaccggaacaggtgttttgacagaatctaacaaaaaattccttcccttccagcaattcgggagagatggatccggcggcggcggtgacggtggtggcggctccggagacaagacccacacctgccccccttgtcctgcccctgagctgctgggcggaccctccgtgtttctgttcccccccaagcccaaggacaccctgatgatcagccggacccccgaggtcacctgcgtggtggtggacgtcagccacgaggacccagaggtcaagttcaattggtatgtggacggcgtggaggtgcacaacgccaagaccaagccccgggaggaacagtacaacagcacctaccgggtggtgtccgtgctgaccgtgctgcaccaggactggctgaacggcaaagaatacaagtgcaaggtgtccaacaaggccctgcctgcccccatcgagaaaaccatcagcaaggccaagggccagcccagagaaccccaggtgtacaccctgccccctagcagggaagagctgaccaagaaccaggtgtccctgacctgtctggtcaagggcttctaccccagcgatatcgccgtggagtgggagagcaacggccagcctgagaacaactacaagaccaccccccctgtgctggacagcgacggcagcttcttcctgtacagcaagctgaccgtggacaagagccggtggcagcagggcaacgtgtttagctgcagcgtgatgcacgaggccctgcacaaccactacacccagaagagcttaagcctgtcccctggcagt

SEQ ID NO: 1848 - DNA, 1419 bp, synthetic construct
  source 1..1419: mol_type = other DNA
tgccccttcggggaagtatttaacgctactcgatttgctagcgtatatgcctggaaccggaagagaataagcaactgtgttgcagactatagcgtgctttacaattccgcatcctttagtaccttcaaatgttacggtgtgagccccaccaaactcaatgatctctgtttcacaaacgtgtacgcagatagtttcgttatacgcggggacgaagtacggcagatagcccctggccagacaggaaagatagccgattacaactacaaacttccagacgattttacagggtgtgtgatcgcttggaattcaaataacctggactccaaagtgggaggcaactataattacctgtaccgactgttccgcaaaagcaacttgaaacctttcgagcgagatatatcaaccgaaatctaccaagctggttctacaccttgtaatggtgtggagggatttaactgctacttccctcttcagtcctatggatttcagcctacaaatggagtcgggtatcaaccctatagagtcgtggtgttgtcatttgaacttctccatgcacctgctactgtctgtggtccaaaaaagtccactaatcttgtaaaaaacaaatgcgtgaacttcaatttcaatggcctcaccggaacaggtgttttgacagaatctaacaaaaaattccttcccttccagcaattcgggagagatggatccggcggcggcggtgacggtggtggcggctccggagacaagacccacacctgccccccttgtcctgcccctgagctgctgggcggaccctccgtgtttctgttcccccccaagcccaaggacaccctgatgatcagccggacccccgaggtcacctgcgtggtggtggacgtcagccacgaggacccagaggtcaagttcaattggtatgtggacggcgtggaggtgcacaacgccaagaccaagccccgggaggaacagtacaacagcacctaccgggtggtgtccgtgctgaccgtgctgcaccaggactggctgaacggcaaagaatacaagtgcaaggtgtccaacaaggccctgcctgcccccatcgagaaaaccatcagcaaggccaagggccagcccagagaaccccaggtgtacaccctgccccctagcagggaagagctgaccaagaaccaggtgtccctgacctgtctggtcaagggcttctaccccagcgatatcgccgtggagtgggagagcaacggccagcctgagaacaactacaagaccaccccccctgtgctggacagcgacggcagcttcttcctgtacagcaagctgaccgtggacaagagccggtggcagcagggcaacgtgtttagctgcagcgtgatgcacgaggccctgcacaaccactacacccagaagagcttaagcctgtcccctggcagt

SEQ ID NO: 1849 - DNA, 1416 bp, synthetic construct
  source 1..1416: mol_type = other DNA
cccttcggggaagtatttaacgctactcgatttgctagcgtatatgcctggaaccggaagagaataagcaactgtgttgcagactatagcgtgctttacaattccgcatcctttagtaccttcaaatgttacggtgtgagccccaccaaactcaatgatctctgtttcacaaacgtgtacgcagatagtttcgttatacgcggggacgaagtacggcagatagcccctggccagacaggaaagatagccgattacaactacaaacttccagacgattttacagggtgtgtgatcgcttggaattcaaataacctggactccaaagtgggaggcaactataattacctgtaccgactgttccgcaaaagcaacttgaaacctttcgagcgagatatatcaaccgaaatctaccaagctggttctacaccttgtaatggtgtggagggatttaactgctacttccctcttcagtcctatggatttcagcctacaaatggagtcgggtatcaaccctatagagtcgtggtgttgtcatttgaacttctccatgcacctgctactgtctgtggtccaaaaaagtccactaatcttgtaaaaaacaaatgcgtgaacttcaatttcaatggcctcaccggaacaggtgttttgacagaatctaacaaaaaattccttcccttccagcaattcgggagagatggatccggcggcggcggtgacggtggtggcggctccggagacaagacccacacctgccccccttgtcctgcccctgagctgctgggcggaccctccgtgtttctgttcccccccaagcccaaggacaccctgatgatcagccggacccccgaggtcacctgcgtggtggtggacgtcagccacgaggacccagaggtcaagttcaattggtatgtggacggcgtggaggtgcacaacgccaagaccaagccccgggaggaacagtacaacagcacctaccgggtggtgtccgtgctgaccgtgctgcaccaggactggctgaacggcaaagaatacaagtgcaaggtgtccaacaaggccctgcctgcccccatcgagaaaaccatcagcaaggccaagggccagcccagagaaccccaggtgtacaccctgccccctagcagggaagagctgaccaagaaccaggtgtccctgacctgtctggtcaagggcttctaccccagcgatatcgccgtggagtgggagagcaacggccagcctgagaacaactacaagaccaccccccctgtgctggacagcgacggcagcttcttcctgtacagcaagctgaccgtggacaagagccggtggcagcagggcaacgtgtttagctgcagcgtgatgcacgaggccctgcacaaccactacacccagaagagcttaagcctgtcccctggcagt

SEQ ID NO: 1850 - DNA, 1413 bp, synthetic construct
  source 1..1413: mol_type = other DNA
ttcggggaagtatttaacgctactcgatttgctagcgtatatgcctggaaccggaagagaataagcaactgtgttgcagactatagcgtgctttacaattccgcatcctttagtaccttcaaatgttacggtgtgagccccaccaaactcaatgatctctgtttcacaaacgtgtacgcagatagtttcgttatacgcggggacgaagtacggcagatagcccctggccagacaggaaagatagccgattacaactacaaacttccagacgattttacagggtgtgtgatcgcttggaattcaaataacctggactccaaagtgggaggcaactataattacctgtaccgactgttccgcaaaagcaacttgaaacctttcgagcgagatatatcaaccgaaatctaccaagctggttctacaccttgtaatggtgtggagggatttaactgctacttccctcttcagtcctatggatttcagcctacaaatggagtcgggtatcaaccctatagagtcgtggtgttgtcatttgaacttctccatgcacctgctactgtctgtggtccaaaaaagtccactaatcttgtaaaaaacaaatgcgtgaacttcaatttcaatggcctcaccggaacaggtgttttgacagaatctaacaaaaaattccttcccttccagcaattcgggagagatggatccggcggcggcggtgacggtggtggcggctccggagacaagacccacacctgccccccttgtcctgcccctgagctgctgggcggaccctccgtgtttctgttcccccccaagcccaaggacaccctgatgatcagccggacccccgaggtcacctgcgtggtggtggacgtcagccacgaggacccagaggtcaagttcaattggtatgtggacggcgtggaggtgcacaacgccaagaccaagccccgggaggaacagtacaacagcacctaccgggtggtgtccgtgctgaccgtgctgcaccaggactggctgaacggcaaagaatacaagtgcaaggtgtccaacaaggccctgcctgcccccatcgagaaaaccatcagcaaggccaagggccagcccagagaaccccaggtgtacaccctgccccctagcagggaagagctgaccaagaaccaggtgtccctgacctgtctggtcaagggcttctaccccagcgatatcgccgtggagtgggagagcaacggccagcctgagaacaactacaagaccaccccccctgtgctggacagcgacggcagcttcttcctgtacagcaagctgaccgtggacaagagccggtggcagcagggcaacgtgtttagctgcagcgtgatgcacgaggccctgcacaaccactacacccagaagagcttaagcctgtcccctggcagt

SEQ ID NO: 1851 - DNA, 1410 bp, synthetic construct
  source 1..1410: mol_type = other DNA
ggggaagtatttaacgctactcgatttgctagcgtatatgcctggaaccggaagagaataagcaactgtgttgcagactatagcgtgctttacaattccgcatcctttagtaccttcaaatgttacggtgtgagccccaccaaactcaatgatctctgtttcacaaacgtgtacgcagatagtttcgttatacgcggggacgaagtacggcagatagcccctggccagacaggaaagatagccgattacaactacaaacttccagacgattttacagggtgtgtgatcgcttggaattcaaataacctggactccaaagtgggaggcaactataattacctgtaccgactgttccgcaaaagcaacttgaaacctttcgagcgagatatatcaaccgaaatctaccaagctggttctacaccttgtaatggtgtggagggatttaactgctacttccctcttcagtcctatggatttcagcctacaaatggagtcgggtatcaaccctatagagtcgtggtgttgtcatttgaacttctccatgcacctgctactgtctgtggtccaaaaaagtccactaatcttgtaaaaaacaaatgcgtgaacttcaatttcaatggcctcaccggaacaggtgttttgacagaatctaacaaaaaattccttcccttccagcaattcgggagagatggatccggcggcggcggtgacggtggtggcggctccggagacaagacccacacctgccccccttgtcctgcccctgagctgctgggcggaccctccgtgtttctgttcccccccaagcccaaggacaccctgatgatcagccggacccccgaggtcacctgcgtggtggtggacgtcagccacgaggacccagaggtcaagttcaattggtatgtggacggcgtggaggtgcacaacgccaagaccaagccccgggaggaacagtacaacagcacctaccgggtggtgtccgtgctgaccgtgctgcaccaggactggctgaacggcaaagaatacaagtgcaaggtgtccaacaaggccctgcctgcccccatcgagaaaaccatcagcaaggccaagggccagcccagagaaccccaggtgtacaccctgccccctagcagggaagagctgaccaagaaccaggtgtccctgacctgtctggtcaagggcttctaccccagcgatatcgccgtggagtgggagagcaacggccagcctgagaacaactacaagaccaccccccctgtgctggacagcgacggcagcttcttcctgtacagcaagctgaccgtggacaagagccggtggcagcagggcaacgtgtttagctgcagcgtgatgcacgaggccctgcacaaccactacacccagaagagcttaagcctgtcccctggcagt

SEQ ID NO: 1852 - DNA, 1407 bp, synthetic construct
  source 1..1407: mol_type = other DNA
gaagtatttaacgctactcgatttgctagcgtatatgcctggaaccggaagagaataagcaactgtgttgcagactatagcgtgctttacaattccgcatcctttagtaccttcaaatgttacggtgtgagccccaccaaactcaatgatctctgtttcacaaacgtgtacgcagatagtttcgttatacgcggggacgaagtacggcagatagcccctggccagacaggaaagatagccgattacaactacaaacttccagacgattttacagggtgtgtgatcgcttggaattcaaataacctggactccaaagtgggaggcaactataattacctgtaccgactgttccgcaaaagcaacttgaaacctttcgagcgagatatatcaaccgaaatctaccaagctggttctacaccttgtaatggtgtggagggatttaactgctacttccctcttcagtcctatggatttcagcctacaaatggagtcgggtatcaaccctatagagtcgtggtgttgtcatttgaacttctccatgcacctgctactgtctgtggtccaaaaaagtccactaatcttgtaaaaaacaaatgcgtgaacttcaatttcaatggcctcaccggaacaggtgttttgacagaatctaacaaaaaattccttcccttccagcaattcgggagagatggatccggcggcggcggtgacggtggtggcggctccggagacaagacccacacctgccccccttgtcctgcccctgagctgctgggcggaccctccgtgtttctgttcccccccaagcccaaggacaccctgatgatcagccggacccccgaggtcacctgcgtggtggtggacgtcagccacgaggacccagaggtcaagttcaattggtatgtggacggcgtggaggtgcacaacgccaagaccaagccccgggaggaacagtacaacagcacctaccgggtggtgtccgtgctgaccgtgctgcaccaggactggctgaacggcaaagaatacaagtgcaaggtgtccaacaaggccctgcctgcccccatcgagaaaaccatcagcaaggccaagggccagcccagagaaccccaggtgtacaccctgccccctagcagggaagagctgaccaagaaccaggtgtccctgacctgtctggtcaagggcttctaccccagcgatatcgccgtggagtgggagagcaacggccagcctgagaacaactacaagaccaccccccctgtgctggacagcgacggcagcttcttcctgtacagcaagctgaccgtggacaagagccggtggcagcagggcaacgtgtttagctgcagcgtgatgcacgaggccctgcacaaccactacacccagaagagcttaagcctgtcccctggcagt

SEQ ID NO: 1853 - DNA, 1404 bp, synthetic construct
  source 1..1404: mol_type = other DNA
gtatttaacgctactcgatttgctagcgtatatgcctggaaccggaagagaataagcaactgtgttgcagactatagcgtgctttacaattccgcatcctttagtaccttcaaatgttacggtgtgagccccaccaaactcaatgatctctgtttcacaaacgtgtacgcagatagtttcgttatacgcggggacgaagtacggcagatagcccctggccagacaggaaagatagccgattacaactacaaacttccagacgattttacagggtgtgtgatcgcttggaattcaaataacctggactccaaagtgggaggcaactataattacctgtaccgactgttccgcaaaagcaacttgaaacctttcgagcgagatatatcaaccgaaatctaccaagctggttctacaccttgtaatggtgtggagggatttaactgctacttccctcttcagtcctatggatttcagcctacaaatggagtcgggtatcaaccctatagagtcgtggtgttgtcatttgaacttctccatgcacctgctactgtctgtggtccaaaaaagtccactaatcttgtaaaaaacaaatgcgtgaacttcaatttcaatggcctcaccggaacaggtgttttgacagaatctaacaaaaaattccttcccttccagcaattcgggagagatggatccggcggcggcggtgacggtggtggcggctccggagacaagacccacacctgccccccttgtcctgcccctgagctgctgggcggaccctccgtgtttctgttcccccccaagcccaaggacaccctgatgatcagccggacccccgaggtcacctgcgtggtggtggacgtcagccacgaggacccagaggtcaagttcaattggtatgtggacggcgtggaggtgcacaacgccaagaccaagccccgggaggaacagtacaacagcacctaccgggtggtgtccgtgctgaccgtgctgcaccaggactggctgaacggcaaagaatacaagtgcaaggtgtccaacaaggccctgcctgcccccatcgagaaaaccatcagcaaggccaagggccagcccagagaaccccaggtgtacaccctgccccctagcagggaagagctgaccaagaaccaggtgtccctgacctgtctggtcaagggcttctaccccagcgatatcgccgtggagtgggagagcaacggccagcctgagaacaactacaagaccaccccccctgtgctggacagcgacggcagcttcttcctgtacagcaagctgaccgtggacaagagccggtggcagcagggcaacgtgtttagctgcagcgtgatgcacgaggccctgcacaaccactacacccagaagagcttaagcctgtcccctggcagt

SEQ ID NO: 1854 - DNA, 1401 bp, synthetic construct
  source 1..1401: mol_type = other DNA
tttaacgctactcgatttgctagcgtatatgcctggaaccggaagagaataagcaactgtgttgcagactatagcgtgctttacaattccgcatcctttagtaccttcaaatgttacggtgtgagccccaccaaactcaatgatctctgtttcacaaacgtgtacgcagatagtttcgttatacgcggggacgaagtacggcagatagcccctggccagacaggaaagatagccgattacaactacaaacttccagacgattttacagggtgtgtgatcgcttggaattcaaataacctggactccaaagtgggaggcaactataattacctgtaccgactgttccgcaaaagcaacttgaaacctttcgagcgagatatatcaaccgaaatctaccaagctggttctacaccttgtaatggtgtggagggatttaactgctacttccctcttcagtcctatggatttcagcctacaaatggagtcgggtatcaaccctatagagtcgtggtgttgtcatttgaacttctccatgcacctgctactgtctgtggtccaaaaaagtccactaatcttgtaaaaaacaaatgcgtgaacttcaatttcaatggcctcaccggaacaggtgttttgacagaatctaacaaaaaattccttcccttccagcaattcgggagagatggatccggcggcggcggtgacggtggtggcggctccggagacaagacccacacctgccccccttgtcctgcccctgagctgctgggcggaccctccgtgtttctgttcccccccaagcccaaggacaccctgatgatcagccggacccccgaggtcacctgcgtggtggtggacgtcagccacgaggacccagaggtcaagttcaattggtatgtggacggcgtggaggtgcacaacgccaagaccaagccccgggaggaacagtacaacagcacctaccgggtggtgtccgtgctgaccgtgctgcaccaggactggctgaacggcaaagaatacaagtgcaaggtgtccaacaaggccctgcctgcccccatcgagaaaaccatcagcaaggccaagggccagcccagagaaccccaggtgtacaccctgccccctagcagggaagagctgaccaagaaccaggtgtccctgacctgtctggtcaagggcttctaccccagcgatatcgccgtggagtgggagagcaacggccagcctgagaacaactacaagaccaccccccctgtgctggacagcgacggcagcttcttcctgtacagcaagctgaccgtggacaagagccggtggcagcagggcaacgtgtttagctgcagcgtgatgcacgaggccctgcacaaccactacacccagaagagcttaagcctgtcccctggcagt

SEQ ID NO: 1855 - DNA, 1398 bp, synthetic construct
  source 1..1398: mol_type = other DNA
aacgctactcgatttgctagcgtatatgcctggaaccggaagagaataagcaactgtgttgcagactatagcgtgctttacaattccgcatcctttagtaccttcaaatgttacggtgtgagccccaccaaactcaatgatctctgtttcacaaacgtgtacgcagatagtttcgttatacgcggggacgaagtacggcagatagcccctggccagacaggaaagatagccgattacaactacaaacttccagacgattttacagggtgtgtgatcgcttggaattcaaataacctggactccaaagtgggaggcaactataattacctgtaccgactgttccgcaaaagcaacttgaaacctttcgagcgagatatatcaaccgaaatctaccaagctggttctacaccttgtaatggtgtggagggatttaactgctacttccctcttcagtcctatggatttcagcctacaaatggagtcgggtatcaaccctatagagtcgtggtgttgtcatttgaacttctccatgcacctgctactgtctgtggtccaaaaaagtccactaatcttgtaaaaaacaaatgcgtgaacttcaatttcaatggcctcaccggaacaggtgttttgacagaatctaacaaaaaattccttcccttccagcaattcgggagagatggatccggcggcggcggtgacggtggtggcggctccggagacaagacccacacctgccccccttgtcctgcccctgagctgctgggcggaccctccgtgtttctgttcccccccaagcccaaggacaccctgatgatcagccggacccccgaggtcacctgcgtggtggtggacgtcagccacgaggacccagaggtcaagttcaattggtatgtggacggcgtggaggtgcacaacgccaagaccaagccccgggaggaacagtacaacagcacctaccgggtggtgtccgtgctgaccgtgctgcaccaggactggctgaacggcaaagaatacaagtgcaaggtgtccaacaaggccctgcctgcccccatcgagaaaaccatcagcaaggccaagggccagcccagagaaccccaggtgtacaccctgccccctagcagggaagagctgaccaagaaccaggtgtccctgacctgtctggtcaagggcttctaccccagcgatatcgccgtggagtgggagagcaacggccagcctgagaacaactacaagaccaccccccctgtgctggacagcgacggcagcttcttcctgtacagcaagctgaccgtggacaagagccggtggcagcagggcaacgtgtttagctgcagcgtgatgcacgaggccctgcacaaccactacacccagaagagcttaagcctgtcccctggcagt

SEQ ID NO: 1856 - DNA, 1395 bp, synthetic construct
  source 1..1395: mol_type = other DNA
gctactcgatttgctagcgtatatgcctggaaccggaagagaataagcaactgtgttgcagactatagcgtgctttacaattccgcatcctttagtaccttcaaatgttacggtgtgagccccaccaaactcaatgatctctgtttcacaaacgtgtacgcagatagtttcgttatacgcggggacgaagtacggcagatagcccctggccagacaggaaagatagccgattacaactacaaacttccagacgattttacagggtgtgtgatcgcttggaattcaaataacctggactccaaagtgggaggcaactataattacctgtaccgactgttccgcaaaagcaacttgaaacctttcgagcgagatatatcaaccgaaatctaccaagctggttctacaccttgtaatggtgtggagggatttaactgctacttccctcttcagtcctatggatttcagcctacaaatggagtcgggtatcaaccctatagagtcgtggtgttgtcatttgaacttctccatgcacctgctactgtctgtggtccaaaaaagtccactaatcttgtaaaaaacaaatgcgtgaacttcaatttcaatggcctcaccggaacaggtgttttgacagaatctaacaaaaaattccttcccttccagcaattcgggagagatggatccggcggcggcggtgacggtggtggcggctccggagacaagacccacacctgccccccttgtcctgcccctgagctgctgggcggaccctccgtgtttctgttcccccccaagcccaaggacaccctgatgatcagccggacccccgaggtcacctgcgtggtggtggacgtcagccacgaggacccagaggtcaagttcaattggtatgtggacggcgtggaggtgcacaacgccaagaccaagccccgggaggaacagtacaacagcacctaccgggtggtgtccgtgctgaccgtgctgcaccaggactggctgaacggcaaagaatacaagtgcaaggtgtccaacaaggccctgcctgcccccatcgagaaaaccatcagcaaggccaagggccagcccagagaaccccaggtgtacaccctgccccctagcagggaagagctgaccaagaaccaggtgtccctgacctgtctggtcaagggcttctaccccagcgatatcgccgtggagtgggagagcaacggccagcctgagaacaactacaagaccaccccccctgtgctggacagcgacggcagcttcttcctgtacagcaagctgaccgtggacaagagccggtggcagcagggcaacgtgtttagctgcagcgtgatgcacgaggccctgcacaaccactacacccagaagagcttaagcctgtcccctggcagt

SEQ ID NO: 1857 - DNA, 1392 bp, synthetic construct
  source 1..1392: mol_type = other DNA
actcgatttgctagcgtatatgcctggaaccggaagagaataagcaactgtgttgcagactatagcgtgctttacaattccgcatcctttagtaccttcaaatgttacggtgtgagccccaccaaactcaatgatctctgtttcacaaacgtgtacgcagatagtttcgttatacgcggggacgaagtacggcagatagcccctggccagacaggaaagatagccgattacaactacaaacttccagacgattttacagggtgtgtgatcgcttggaattcaaataacctggactccaaagtgggaggcaactataattacctgtaccgactgttccgcaaaagcaacttgaaacctttcgagcgagatatatcaaccgaaatctaccaagctggttctacaccttgtaatggtgtggagggatttaactgctacttccctcttcagtcctatggatttcagcctacaaatggagtcgggtatcaaccctatagagtcgtggtgttgtcatttgaacttctccatgcacctgctactgtctgtggtccaaaaaagtccactaatcttgtaaaaaacaaatgcgtgaacttcaatttcaatggcctcaccggaacaggtgttttgacagaatctaacaaaaaattccttcccttccagcaattcgggagagatggatccggcggcggcggtgacggtggtggcggctccggagacaagacccacacctgccccccttgtcctgcccctgagctgctgggcggaccctccgtgtttctgttcccccccaagcccaaggacaccctgatgatcagccggacccccgaggtcacctgcgtggtggtggacgtcagccacgaggacccagaggtcaagttcaattggtatgtggacggcgtggaggtgcacaacgccaagaccaagccccgggaggaacagtacaacagcacctaccgggtggtgtccgtgctgaccgtgctgcaccaggactggctgaacggcaaagaatacaagtgcaaggtgtccaacaaggccctgcctgcccccatcgagaaaaccatcagcaaggccaagggccagcccagagaaccccaggtgtacaccctgccccctagcagggaagagctgaccaagaaccaggtgtccctgacctgtctggtcaagggcttctaccccagcgatatcgccgtggagtgggagagcaacggccagcctgagaacaactacaagaccaccccccctgtgctggacagcgacggcagcttcttcctgtacagcaagctgaccgtggacaagagccggtggcagcagggcaacgtgtttagctgcagcgtgatgcacgaggccctgcacaaccactacacccagaagagcttaagcctgtcccctggcagt

SEQ ID NO: 1858 - DNA, 1389 bp, synthetic construct
  source 1..1389: mol_type = other DNA
cgatttgctagcgtatatgcctggaaccggaagagaataagcaactgtgttgcagactatagcgtgctttacaattccgcatcctttagtaccttcaaatgttacggtgtgagccccaccaaactcaatgatctctgtttcacaaacgtgtacgcagatagtttcgttatacgcggggacgaagtacggcagatagcccctggccagacaggaaagatagccgattacaactacaaacttccagacgattttacagggtgtgtgatcgcttggaattcaaataacctggactccaaagtgggaggcaactataattacctgtaccgactgttccgcaaaagcaacttgaaacctttcgagcgagatatatcaaccgaaatctaccaagctggttctacaccttgtaatggtgtggagggatttaactgctacttccctcttcagtcctatggatttcagcctacaaatggagtcgggtatcaaccctatagagtcgtggtgttgtcatttgaacttctccatgcacctgctactgtctgtggtccaaaaaagtccactaatcttgtaaaaaacaaatgcgtgaacttcaatttcaatggcctcaccggaacaggtgttttgacagaatctaacaaaaaattccttcccttccagcaattcgggagagatggatccggcggcggcggtgacggtggtggcggctccggagacaagacccacacctgccccccttgtcctgcccctgagctgctgggcggaccctccgtgtttctgttcccccccaagcccaaggacaccctgatgatcagccggacccccgaggtcacctgcgtggtggtggacgtcagccacgaggacccagaggtcaagttcaattggtatgtggacggcgtggaggtgcacaacgccaagaccaagccccgggaggaacagtacaacagcacctaccgggtggtgtccgtgctgaccgtgctgcaccaggactggctgaacggcaaagaatacaagtgcaaggtgtccaacaaggccctgcctgcccccatcgagaaaaccatcagcaaggccaagggccagcccagagaaccccaggtgtacaccctgccccctagcagggaagagctgaccaagaaccaggtgtccctgacctgtctggtcaagggcttctaccccagcgatatcgccgtggagtgggagagcaacggccagcctgagaacaactacaagaccaccccccctgtgctggacagcgacggcagcttcttcctgtacagcaagctgaccgtggacaagagccggtggcagcagggcaacgtgtttagctgcagcgtgatgcacgaggccctgcacaaccactacacccagaagagcttaagcctgtcccctggcagt

SEQ ID NO: 1859 - DNA, 1386 bp, synthetic construct
  source 1..1386: mol_type = other DNA
tttgctagcgtatatgcctggaaccggaagagaataagcaactgtgttgcagactatagcgtgctttacaattccgcatcctttagtaccttcaaatgttacggtgtgagccccaccaaactcaatgatctctgtttcacaaacgtgtacgcagatagtttcgttatacgcggggacgaagtacggcagatagcccctggccagacaggaaagatagccgattacaactacaaacttccagacgattttacagggtgtgtgatcgcttggaattcaaataacctggactccaaagtgggaggcaactataattacctgtaccgactgttccgcaaaagcaacttgaaacctttcgagcgagatatatcaaccgaaatctaccaagctggttctacaccttgtaatggtgtggagggatttaactgctacttccctcttcagtcctatggatttcagcctacaaatggagtcgggtatcaaccctatagagtcgtggtgttgtcatttgaacttctccatgcacctgctactgtctgtggtccaaaaaagtccactaatcttgtaaaaaacaaatgcgtgaacttcaatttcaatggcctcaccggaacaggtgttttgacagaatctaacaaaaaattccttcccttccagcaattcgggagagatggatccggcggcggcggtgacggtggtggcggctccggagacaagacccacacctgccccccttgtcctgcccctgagctgctgggcggaccctccgtgtttctgttcccccccaagcccaaggacaccctgatgatcagccggacccccgaggtcacctgcgtggtggtggacgtcagccacgaggacccagaggtcaagttcaattggtatgtggacggcgtggaggtgcacaacgccaagaccaagccccgggaggaacagtacaacagcacctaccgggtggtgtccgtgctgaccgtgctgcaccaggactggctgaacggcaaagaatacaagtgcaaggtgtccaacaaggccctgcctgcccccatcgagaaaaccatcagcaaggccaagggccagcccagagaaccccaggtgtacaccctgccccctagcagggaagagctgaccaagaaccaggtgtccctgacctgtctggtcaagggcttctaccccagcgatatcgccgtggagtgggagagcaacggccagcctgagaacaactacaagaccaccccccctgtgctggacagcgacggcagcttcttcctgtacagcaagctgaccgtggacaagagccggtggcagcagggcaacgtgtttagctgcagcgtgatgcacgaggccctgcacaaccactacacccagaagagcttaagcctgtcccctggcagt

SEQ ID NO: 1860 - DNA, 1383 bp, synthetic construct
  source 1..1383: mol_type = other DNA
gctagcgtatatgcctggaaccggaagagaataagcaactgtgttgcagactatagcgtgctttacaattccgcatcctttagtaccttcaaatgttacggtgtgagccccaccaaactcaatgatctctgtttcacaaacgtgtacgcagatagtttcgttatacgcggggacgaagtacggcagatagcccctggccagacaggaaagatagccgattacaactacaaacttccagacgattttacagggtgtgtgatcgcttggaattcaaataacctggactccaaagtgggaggcaactataattacctgtaccgactgttccgcaaaagcaacttgaaacctttcgagcgagatatatcaaccgaaatctaccaagctggttctacaccttgtaatggtgtggagggatttaactgctacttccctcttcagtcctatggatttcagcctacaaatggagtcgggtatcaaccctatagagtcgtggtgttgtcatttgaacttctccatgcacctgctactgtctgtggtccaaaaaagtccactaatcttgtaaaaaacaaatgcgtgaacttcaatttcaatggcctcaccggaacaggtgttttgacagaatctaacaaaaaattccttcccttccagcaattcgggagagatggatccggcggcggcggtgacggtggtggcggctccggagacaagacccacacctgccccccttgtcctgcccctgagctgctgggcggaccctccgtgtttctgttcccccccaagcccaaggacaccctgatgatcagccggacccccgaggtcacctgcgtggtggtggacgtcagccacgaggacccagaggtcaagttcaattggtatgtggacggcgtggaggtgcacaacgccaagaccaagccccgggaggaacagtacaacagcacctaccgggtggtgtccgtgctgaccgtgctgcaccaggactggctgaacggcaaagaatacaagtgcaaggtgtccaacaaggccctgcctgcccccatcgagaaaaccatcagcaaggccaagggccagcccagagaaccccaggtgtacaccctgccccctagcagggaagagctgaccaagaaccaggtgtccctgacctgtctggtcaagggcttctaccccagcgatatcgccgtggagtgggagagcaacggccagcctgagaacaactacaagaccaccccccctgtgctggacagcgacggcagcttcttcctgtacagcaagctgaccgtggacaagagccggtggcagcagggcaacgtgtttagctgcagcgtgatgcacgaggccctgcacaaccactacacccagaagagcttaagcctgtcccctggcagt

SEQ ID NO: 1861 - DNA, 1380 bp, synthetic construct
  source 1..1380: mol_type = other DNA
agcgtatatgcctggaaccggaagagaataagcaactgtgttgcagactatagcgtgctttacaattccgcatcctttagtaccttcaaatgttacggtgtgagccccaccaaactcaatgatctctgtttcacaaacgtgtacgcagatagtttcgttatacgcggggacgaagtacggcagatagcccctggccagacaggaaagatagccgattacaactacaaacttccagacgattttacagggtgtgtgatcgcttggaattcaaataacctggactccaaagtgggaggcaactataattacctgtaccgactgttccgcaaaagcaacttgaaacctttcgagcgagatatatcaaccgaaatctaccaagctggttctacaccttgtaatggtgtggagggatttaactgctacttccctcttcagtcctatggatttcagcctacaaatggagtcgggtatcaaccctatagagtcgtggtgttgtcatttgaacttctccatgcacctgctactgtctgtggtccaaaaaagtccactaatcttgtaaaaaacaaatgcgtgaacttcaatttcaatggcctcaccggaacaggtgttttgacagaatctaacaaaaaattccttcccttccagcaattcgggagagatggatccggcggcggcggtgacggtggtggcggctccggagacaagacccacacctgccccccttgtcctgcccctgagctgctgggcggaccctccgtgtttctgttcccccccaagcccaaggacaccctgatgatcagccggacccccgaggtcacctgcgtggtggtggacgtcagccacgaggacccagaggtcaagttcaattggtatgtggacggcgtggaggtgcacaacgccaagaccaagccccgggaggaacagtacaacagcacctaccgggtggtgtccgtgctgaccgtgctgcaccaggactggctgaacggcaaagaatacaagtgcaaggtgtccaacaaggccctgcctgcccccatcgagaaaaccatcagcaaggccaagggccagcccagagaaccccaggtgtacaccctgccccctagcagggaagagctgaccaagaaccaggtgtccctgacctgtctggtcaagggcttctaccccagcgatatcgccgtggagtgggagagcaacggccagcctgagaacaactacaagaccaccccccctgtgctggacagcgacggcagcttcttcctgtacagcaagctgaccgtggacaagagccggtggcagcagggcaacgtgtttagctgcagcgtgatgcacgaggccctgcacaaccactacacccagaagagcttaagcctgtcccctggcagt

SEQ ID NO: 1862 - DNA, 1377 bp, synthetic construct
  source 1..1377: mol_type = other DNA
gtatatgcctggaaccggaagagaataagcaactgtgttgcagactatagcgtgctttacaattccgcatcctttagtaccttcaaatgttacggtgtgagccccaccaaactcaatgatctctgtttcacaaacgtgtacgcagatagtttcgttatacgcggggacgaagtacggcagatagcccctggccagacaggaaagatagccgattacaactacaaacttccagacgattttacagggtgtgtgatcgcttggaattcaaataacctggactccaaagtgggaggcaactataattacctgtaccgactgttccgcaaaagcaacttgaaacctttcgagcgagatatatcaaccgaaatctaccaagctggttctacaccttgtaatggtgtggagggatttaactgctacttccctcttcagtcctatggatttcagcctacaaatggagtcgggtatcaaccctatagagtcgtggtgttgtcatttgaacttctccatgcacctgctactgtctgtggtccaaaaaagtccactaatcttgtaaaaaacaaatgcgtgaacttcaatttcaatggcctcaccggaacaggtgttttgacagaatctaacaaaaaattccttcccttccagcaattcgggagagatggatccggcggcggcggtgacggtggtggcggctccggagacaagacccacacctgccccccttgtcctgcccctgagctgctgggcggaccctccgtgtttctgttcccccccaagcccaaggacaccctgatgatcagccggacccccgaggtcacctgcgtggtggtggacgtcagccacgaggacccagaggtcaagttcaattggtatgtggacggcgtggaggtgcacaacgccaagaccaagccccgggaggaacagtacaacagcacctaccgggtggtgtccgtgctgaccgtgctgcaccaggactggctgaacggcaaagaatacaagtgcaaggtgtccaacaaggccctgcctgcccccatcgagaaaaccatcagcaaggccaagggccagcccagagaaccccaggtgtacaccctgccccctagcagggaagagctgaccaagaaccaggtgtccctgacctgtctggtcaagggcttctaccccagcgatatcgccgtggagtgggagagcaacggccagcctgagaacaactacaagaccaccccccctgtgctggacagcgacggcagcttcttcctgtacagcaagctgaccgtggacaagagccggtggcagcagggcaacgtgtttagctgcagcgtgatgcacgaggccctgcacaaccactacacccagaagagcttaagcctgtcccctggcagt

SEQ ID NO: 1863 - DNA, 1374 bp, synthetic construct
  source 1..1374: mol_type = other DNA
tatgcctggaaccggaagagaataagcaactgtgttgcagactatagcgtgctttacaattccgcatcctttagtaccttcaaatgttacggtgtgagccccaccaaactcaatgatctctgtttcacaaacgtgtacgcagatagtttcgttatacgcggggacgaagtacggcagatagcccctggccagacaggaaagatagccgattacaactacaaacttccagacgattttacagggtgtgtgatcgcttggaattcaaataacctggactccaaagtgggaggcaactataattacctgtaccgactgttccgcaaaagcaacttgaaacctttcgagcgagatatatcaaccgaaatctaccaagctggttctacaccttgtaatggtgtggagggatttaactgctacttccctcttcagtcctatggatttcagcctacaaatggagtcgggtatcaaccctatagagtcgtggtgttgtcatttgaacttctccatgcacctgctactgtctgtggtccaaaaaagtccactaatcttgtaaaaaacaaatgcgtgaacttcaatttcaatggcctcaccggaacaggtgttttgacagaatctaacaaaaaattccttcccttccagcaattcgggagagatggatccggcggcggcggtgacggtggtggcggctccggagacaagacccacacctgccccccttgtcctgcccctgagctgctgggcggaccctccgtgtttctgttcccccccaagcccaaggacaccctgatgatcagccggacccccgaggtcacctgcgtggtggtggacgtcagccacgaggacccagaggtcaagttcaattggtatgtggacggcgtggaggtgcacaacgccaagaccaagccccgggaggaacagtacaacagcacctaccgggtggtgtccgtgctgaccgtgctgcaccaggactggctgaacggcaaagaatacaagtgcaaggtgtccaacaaggccctgcctgcccccatcgagaaaaccatcagcaaggccaagggccagcccagagaaccccaggtgtacaccctgccccctagcagggaagagctgaccaagaaccaggtgtccctgacctgtctggtcaagggcttctaccccagcgatatcgccgtggagtgggagagcaacggccagcctgagaacaactacaagaccaccccccctgtgctggacagcgacggcagcttcttcctgtacagcaagctgaccgtggacaagagccggtggcagcagggcaacgtgtttagctgcagcgtgatgcacgaggccctgcacaaccactacacccagaagagcttaagcctgtcccctggcagt

SEQ ID NO: 1864 - DNA, 1371 bp, synthetic construct
  source 1..1371: mol_type = other DNA
gcctggaaccggaagagaataagcaactgtgttgcagactatagcgtgctttacaattccgcatcctttagtaccttcaaatgttacggtgtgagccccaccaaactcaatgatctctgtttcacaaacgtgtacgcagatagtttcgttatacgcggggacgaagtacggcagatagcccctggccagacaggaaagatagccgattacaactacaaacttccagacgattttacagggtgtgtgatcgcttggaattcaaataacctggactccaaagtgggaggcaactataattacctgtaccgactgttccgcaaaagcaacttgaaacctttcgagcgagatatatcaaccgaaatctaccaagctggttctacaccttgtaatggtgtggagggatttaactgctacttccctcttcagtcctatggatttcagcctacaaatggagtcgggtatcaaccctatagagtcgtggtgttgtcatttgaacttctccatgcacctgctactgtctgtggtccaaaaaagtccactaatcttgtaaaaaacaaatgcgtgaacttcaatttcaatggcctcaccggaacaggtgttttgacagaatctaacaaaaaattccttcccttccagcaattcgggagagatggatccggcggcggcggtgacggtggtggcggctccggagacaagacccacacctgccccccttgtcctgcccctgagctgctgggcggaccctccgtgtttctgttcccccccaagcccaaggacaccctgatgatcagccggacccccgaggtcacctgcgtggtggtggacgtcagccacgaggacccagaggtcaagttcaattggtatgtggacggcgtggaggtgcacaacgccaagaccaagccccgggaggaacagtacaacagcacctaccgggtggtgtccgtgctgaccgtgctgcaccaggactggctgaacggcaaagaatacaagtgcaaggtgtccaacaaggccctgcctgcccccatcgagaaaaccatcagcaaggccaagggccagcccagagaaccccaggtgtacaccctgccccctagcagggaagagctgaccaagaaccaggtgtccctgacctgtctggtcaagggcttctaccccagcgatatcgccgtggagtgggagagcaacggccagcctgagaacaactacaagaccaccccccctgtgctggacagcgacggcagcttcttcctgtacagcaagctgaccgtggacaagagccggtggcagcagggcaacgtgtttagctgcagcgtgatgcacgaggccctgcacaaccactacacccagaagagcttaagcctgtcccctggcagt

SEQ ID NO: 1865 - DNA, 1368 bp, synthetic construct
  source 1..1368: mol_type = other DNA
tggaaccggaagagaataagcaactgtgttgcagactatagcgtgctttacaattccgcatcctttagtaccttcaaatgttacggtgtgagccccaccaaactcaatgatctctgtttcacaaacgtgtacgcagatagtttcgttatacgcggggacgaagtacggcagatagcccctggccagacaggaaagatagccgattacaactacaaacttccagacgattttacagggtgtgtgatcgcttggaattcaaataacctggactccaaagtgggaggcaactataattacctgtaccgactgttccgcaaaagcaacttgaaacctttcgagcgagatatatcaaccgaaatctaccaagctggttctacaccttgtaatggtgtggagggatttaactgctacttccctcttcagtcctatggatttcagcctacaaatggagtcgggtatcaaccctatagagtcgtggtgttgtcatttgaacttctccatgcacctgctactgtctgtggtccaaaaaagtccactaatcttgtaaaaaacaaatgcgtgaacttcaatttcaatggcctcaccggaacaggtgttttgacagaatctaacaaaaaattccttcccttccagcaattcgggagagatggatccggcggcggcggtgacggtggtggcggctccggagacaagacccacacctgccccccttgtcctgcccctgagctgctgggcggaccctccgtgtttctgttcccccccaagcccaaggacaccctgatgatcagccggacccccgaggtcacctgcgtggtggtggacgtcagccacgaggacccagaggtcaagttcaattggtatgtggacggcgtggaggtgcacaacgccaagaccaagccccgggaggaacagtacaacagcacctaccgggtggtgtccgtgctgaccgtgctgcaccaggactggctgaacggcaaagaatacaagtgcaaggtgtccaacaaggccctgcctgcccccatcgagaaaaccatcagcaaggccaagggccagcccagagaaccccaggtgtacaccctgccccctagcagggaagagctgaccaagaaccaggtgtccctgacctgtctggtcaagggcttctaccccagcgatatcgccgtggagtgggagagcaacggccagcctgagaacaactacaagaccaccccccctgtgctggacagcgacggcagcttcttcctgtacagcaagctgaccgtggacaagagccggtggcagcagggcaacgtgtttagctgcagcgtgatgcacgaggccctgcacaaccactacacccagaagagcttaagcctgtcccctggcagt

SEQ ID NO: 1866 - DNA, 1365 bp, synthetic construct
  source 1..1365: mol_type = other DNA
aaccggaagagaataagcaactgtgttgcagactatagcgtgctttacaattccgcatcctttagtaccttcaaatgttacggtgtgagccccaccaaactcaatgatctctgtttcacaaacgtgtacgcagatagtttcgttatacgcggggacgaagtacggcagatagcccctggccagacaggaaagatagccgattacaactacaaacttccagacgattttacagggtgtgtgatcgcttggaattcaaataacctggactccaaagtgggaggcaactataattacctgtaccgactgttccgcaaaagcaacttgaaacctttcgagcgagatatatcaaccgaaatctaccaagctggttctacaccttgtaatggtgtggagggatttaactgctacttccctcttcagtcctatggatttcagcctacaaatggagtcgggtatcaaccctatagagtcgtggtgttgtcatttgaacttctccatgcacctgctactgtctgtggtccaaaaaagtccactaatcttgtaaaaaacaaatgcgtgaacttcaatttcaatggcctcaccggaacaggtgttttgacagaatctaacaaaaaattccttcccttccagcaattcgggagagatggatccggcggcggcggtgacggtggtggcggctccggagacaagacccacacctgccccccttgtcctgcccctgagctgctgggcggaccctccgtgtttctgttcccccccaagcccaaggacaccctgatgatcagccggacccccgaggtcacctgcgtggtggtggacgtcagccacgaggacccagaggtcaagttcaattggtatgtggacggcgtggaggtgcacaacgccaagaccaagccccgggaggaacagtacaacagcacctaccgggtggtgtccgtgctgaccgtgctgcaccaggactggctgaacggcaaagaatacaagtgcaaggtgtccaacaaggccctgcctgcccccatcgagaaaaccatcagcaaggccaagggccagcccagagaaccccaggtgtacaccctgccccctagcagggaagagctgaccaagaaccaggtgtccctgacctgtctggtcaagggcttctaccccagcgatatcgccgtggagtgggagagcaacggccagcctgagaacaactacaagaccaccccccctgtgctggacagcgacggcagcttcttcctgtacagcaagctgaccgtggacaagagccggtggcagcagggcaacgtgtttagctgcagcgtgatgcacgaggccctgcacaaccactacacccagaagagcttaagcctgtcccctggcagt

SEQ ID NO: 1867 - DNA, 1362 bp, synthetic construct
  source 1..1362: mol_type = other DNA
cggaagagaataagcaactgtgttgcagactatagcgtgctttacaattccgcatcctttagtaccttcaaatgttacggtgtgagccccaccaaactcaatgatctctgtttcacaaacgtgtacgcagatagtttcgttatacgcggggacgaagtacggcagatagcccctggccagacaggaaagatagccgattacaactacaaacttccagacgattttacagggtgtgtgatcgcttggaattcaaataacctggactccaaagtgggaggcaactataattacctgtaccgactgttccgcaaaagcaacttgaaacctttcgagcgagatatatcaaccgaaatctaccaagctggttctacaccttgtaatggtgtggagggatttaactgctacttccctcttcagtcctatggatttcagcctacaaatggagtcgggtatcaaccctatagagtcgtggtgttgtcatttgaacttctccatgcacctgctactgtctgtggtccaaaaaagtccactaatcttgtaaaaaacaaatgcgtgaacttcaatttcaatggcctcaccggaacaggtgttttgacagaatctaacaaaaaattccttcccttccagcaattcgggagagatggatccggcggcggcggtgacggtggtggcggctccggagacaagacccacacctgccccccttgtcctgcccctgagctgctgggcggaccctccgtgtttctgttcccccccaagcccaaggacaccctgatgatcagccggacccccgaggtcacctgcgtggtggtggacgtcagccacgaggacccagaggtcaagttcaattggtatgtggacggcgtggaggtgcacaacgccaagaccaagccccgggaggaacagtacaacagcacctaccgggtggtgtccgtgctgaccgtgctgcaccaggactggctgaacggcaaagaatacaagtgcaaggtgtccaacaaggccctgcctgcccccatcgagaaaaccatcagcaaggccaagggccagcccagagaaccccaggtgtacaccctgccccctagcagggaagagctgaccaagaaccaggtgtccctgacctgtctggtcaagggcttctaccccagcgatatcgccgtggagtgggagagcaacggccagcctgagaacaactacaagaccaccccccctgtgctggacagcgacggcagcttcttcctgtacagcaagctgaccgtggacaagagccggtggcagcagggcaacgtgtttagctgcagcgtgatgcacgaggccctgcacaaccactacacccagaagagcttaagcctgtcccctggcagt

SEQ ID NO: 1868 - DNA, 1359 bp, synthetic construct
  source 1..1359: mol_type = other DNA
aagagaataagcaactgtgttgcagactatagcgtgctttacaattccgcatcctttagtaccttcaaatgttacggtgtgagccccaccaaactcaatgatctctgtttcacaaacgtgtacgcagatagtttcgttatacgcggggacgaagtacggcagatagcccctggccagacaggaaagatagccgattacaactacaaacttccagacgattttacagggtgtgtgatcgcttggaattcaaataacctggactccaaagtgggaggcaactataattacctgtaccgactgttccgcaaaagcaacttgaaacctttcgagcgagatatatcaaccgaaatctaccaagctggttctacaccttgtaatggtgtggagggatttaactgctacttccctcttcagtcctatggatttcagcctacaaatggagtcgggtatcaaccctatagagtcgtggtgttgtcatttgaacttctccatgcacctgctactgtctgtggtccaaaaaagtccactaatcttgtaaaaaacaaatgcgtgaacttcaatttcaatggcctcaccggaacaggtgttttgacagaatctaacaaaaaattccttcccttccagcaattcgggagagatggatccggcggcggcggtgacggtggtggcggctccggagacaagacccacacctgccccccttgtcctgcccctgagctgctgggcggaccctccgtgtttctgttcccccccaagcccaaggacaccctgatgatcagccggacccccgaggtcacctgcgtggtggtggacgtcagccacgaggacccagaggtcaagttcaattggtatgtggacggcgtggaggtgcacaacgccaagaccaagccccgggaggaacagtacaacagcacctaccgggtggtgtccgtgctgaccgtgctgcaccaggactggctgaacggcaaagaatacaagtgcaaggtgtccaacaaggccctgcctgcccccatcgagaaaaccatcagcaaggccaagggccagcccagagaaccccaggtgtacaccctgccccctagcagggaagagctgaccaagaaccaggtgtccctgacctgtctggtcaagggcttctaccccagcgatatcgccgtggagtgggagagcaacggccagcctgagaacaactacaagaccaccccccctgtgctggacagcgacggcagcttcttcctgtacagcaagctgaccgtggacaagagccggtggcagcagggcaacgtgtttagctgcagcgtgatgcacgaggccctgcacaaccactacacccagaagagcttaagcctgtcccctggcagt

SEQ ID NO: 1869 - DNA, 1356 bp, synthetic construct
  source 1..1356: mol_type = other DNA
agaataagcaactgtgttgcagactatagcgtgctttacaattccgcatcctttagtaccttcaaatgttacggtgtgagccccaccaaactcaatgatctctgtttcacaaacgtgtacgcagatagtttcgttatacgcggggacgaagtacggcagatagcccctggccagacaggaaagatagccgattacaactacaaacttccagacgattttacagggtgtgtgatcgcttggaattcaaataacctggactccaaagtgggaggcaactataattacctgtaccgactgttccgcaaaagcaacttgaaacctttcgagcgagatatatcaaccgaaatctaccaagctggttctacaccttgtaatggtgtggagggatttaactgctacttccctcttcagtcctatggatttcagcctacaaatggagtcgggtatcaaccctatagagtcgtggtgttgtcatttgaacttctccatgcacctgctactgtctgtggtccaaaaaagtccactaatcttgtaaaaaacaaatgcgtgaacttcaatttcaatggcctcaccggaacaggtgttttgacagaatctaacaaaaaattccttcccttccagcaattcgggagagatggatccggcggcggcggtgacggtggtggcggctccggagacaagacccacacctgccccccttgtcctgcccctgagctgctgggcggaccctccgtgtttctgttcccccccaagcccaaggacaccctgatgatcagccggacccccgaggtcacctgcgtggtggtggacgtcagccacgaggacccagaggtcaagttcaattggtatgtggacggcgtggaggtgcacaacgccaagaccaagccccgggaggaacagtacaacagcacctaccgggtggtgtccgtgctgaccgtgctgcaccaggactggctgaacggcaaagaatacaagtgcaaggtgtccaacaaggccctgcctgcccccatcgagaaaaccatcagcaaggccaagggccagcccagagaaccccaggtgtacaccctgccccctagcagggaagagctgaccaagaaccaggtgtccctgacctgtctggtcaagggcttctaccccagcgatatcgccgtggagtgggagagcaacggccagcctgagaacaactacaagaccaccccccctgtgctggacagcgacggcagcttcttcctgtacagcaagctgaccgtggacaagagccggtggcagcagggcaacgtgtttagctgcagcgtgatgcacgaggccctgcacaaccactacacccagaagagcttaagcctgtcccctggcagt

SEQ ID NO: 1870 - DNA, 1353 bp, synthetic construct
  source 1..1353: mol_type = other DNA
ataagcaactgtgttgcagactatagcgtgctttacaattccgcatcctttagtaccttcaaatgttacggtgtgagccccaccaaactcaatgatctctgtttcacaaacgtgtacgcagatagtttcgttatacgcggggacgaagtacggcagatagcccctggccagacaggaaagatagccgattacaactacaaacttccagacgattttacagggtgtgtgatcgcttggaattcaaataacctggactccaaagtgggaggcaactataattacctgtaccgactgttccgcaaaagcaacttgaaacctttcgagcgagatatatcaaccgaaatctaccaagctggttctacaccttgtaatggtgtggagggatttaactgctacttccctcttcagtcctatggatttcagcctacaaatggagtcgggtatcaaccctatagagtcgtggtgttgtcatttgaacttctccatgcacctgctactgtctgtggtccaaaaaagtccactaatcttgtaaaaaacaaatgcgtgaacttcaatttcaatggcctcaccggaacaggtgttttgacagaatctaacaaaaaattccttcccttccagcaattcgggagagatggatccggcggcggcggtgacggtggtggcggctccggagacaagacccacacctgccccccttgtcctgcccctgagctgctgggcggaccctccgtgtttctgttcccccccaagcccaaggacaccctgatgatcagccggacccccgaggtcacctgcgtggtggtggacgtcagccacgaggacccagaggtcaagttcaattggtatgtggacggcgtggaggtgcacaacgccaagaccaagccccgggaggaacagtacaacagcacctaccgggtggtgtccgtgctgaccgtgctgcaccaggactggctgaacggcaaagaatacaagtgcaaggtgtccaacaaggccctgcctgcccccatcgagaaaaccatcagcaaggccaagggccagcccagagaaccccaggtgtacaccctgccccctagcagggaagagctgaccaagaaccaggtgtccctgacctgtctggtcaagggcttctaccccagcgatatcgccgtggagtgggagagcaacggccagcctgagaacaactacaagaccaccccccctgtgctggacagcgacggcagcttcttcctgtacagcaagctgaccgtggacaagagccggtggcagcagggcaacgtgtttagctgcagcgtgatgcacgaggccctgcacaaccactacacccagaagagcttaagcctgtcccctggcagt

SEQ ID NO: 1871 - DNA, 1350 bp, synthetic construct
  source 1..1350: mol_type = other DNA
agcaactgtgttgcagactatagcgtgctttacaattccgcatcctttagtaccttcaaatgttacggtgtgagccccaccaaactcaatgatctctgtttcacaaacgtgtacgcagatagtttcgttatacgcggggacgaagtacggcagatagcccctggccagacaggaaagatagccgattacaactacaaacttccagacgattttacagggtgtgtgatcgcttggaattcaaataacctggactccaaagtgggaggcaactataattacctgtaccgactgttccgcaaaagcaacttgaaacctttcgagcgagatatatcaaccgaaatctaccaagctggttctacaccttgtaatggtgtggagggatttaactgctacttccctcttcagtcctatggatttcagcctacaaatggagtcgggtatcaaccctatagagtcgtggtgttgtcatttgaacttctccatgcacctgctactgtctgtggtccaaaaaagtccactaatcttgtaaaaaacaaatgcgtgaacttcaatttcaatggcctcaccggaacaggtgttttgacagaatctaacaaaaaattccttcccttccagcaattcgggagagatggatccggcggcggcggtgacggtggtggcggctccggagacaagacccacacctgccccccttgtcctgcccctgagctgctgggcggaccctccgtgtttctgttcccccccaagcccaaggacaccctgatgatcagccggacccccgaggtcacctgcgtggtggtggacgtcagccacgaggacccagaggtcaagttcaattggtatgtggacggcgtggaggtgcacaacgccaagaccaagccccgggaggaacagtacaacagcacctaccgggtggtgtccgtgctgaccgtgctgcaccaggactggctgaacggcaaagaatacaagtgcaaggtgtccaacaaggccctgcctgcccccatcgagaaaaccatcagcaaggccaagggccagcccagagaaccccaggtgtacaccctgccccctagcagggaagagctgaccaagaaccaggtgtccctgacctgtctggtcaagggcttctaccccagcgatatcgccgtggagtgggagagcaacggccagcctgagaacaactacaagaccaccccccctgtgctggacagcgacggcagcttcttcctgtacagcaagctgaccgtggacaagagccggtggcagcagggcaacgtgtttagctgcagcgtgatgcacgaggccctgcacaaccactacacccagaagagcttaagcctgtcccctggcagt

SEQ ID NO: 1872 - DNA, 1347 bp, synthetic construct
  source 1..1347: mol_type = other DNA
aactgtgttgcagactatagcgtgctttacaattccgcatcctttagtaccttcaaatgttacggtgtgagccccaccaaactcaatgatctctgtttcacaaacgtgtacgcagatagtttcgttatacgcggggacgaagtacggcagatagcccctggccagacaggaaagatagccgattacaactacaaacttccagacgattttacagggtgtgtgatcgcttggaattcaaataacctggactccaaagtgggaggcaactataattacctgtaccgactgttccgcaaaagcaacttgaaacctttcgagcgagatatatcaaccgaaatctaccaagctggttctacaccttgtaatggtgtggagggatttaactgctacttccctcttcagtcctatggatttcagcctacaaatggagtcgggtatcaaccctatagagtcgtggtgttgtcatttgaacttctccatgcacctgctactgtctgtggtccaaaaaagtccactaatcttgtaaaaaacaaatgcgtgaacttcaatttcaatggcctcaccggaacaggtgttttgacagaatctaacaaaaaattccttcccttccagcaattcgggagagatggatccggcggcggcggtgacggtggtggcggctccggagacaagacccacacctgccccccttgtcctgcccctgagctgctgggcggaccctccgtgtttctgttcccccccaagcccaaggacaccctgatgatcagccggacccccgaggtcacctgcgtggtggtggacgtcagccacgaggacccagaggtcaagttcaattggtatgtggacggcgtggaggtgcacaacgccaagaccaagccccgggaggaacagtacaacagcacctaccgggtggtgtccgtgctgaccgtgctgcaccaggactggctgaacggcaaagaatacaagtgcaaggtgtccaacaaggccctgcctgcccccatcgagaaaaccatcagcaaggccaagggccagcccagagaaccccaggtgtacaccctgccccctagcagggaagagctgaccaagaaccaggtgtccctgacctgtctggtcaagggcttctaccccagcgatatcgccgtggagtgggagagcaacggccagcctgagaacaactacaagaccaccccccctgtgctggacagcgacggcagcttcttcctgtacagcaagctgaccgtggacaagagccggtggcagcagggcaacgtgtttagctgcagcgtgatgcacgaggccctgcacaaccactacacccagaagagcttaagcctgtcccctggcagt

SEQ ID NO: 1873 - DNA, 1344 bp, synthetic construct
  source 1..1344: mol_type = other DNA
tgtgttgcagactatagcgtgctttacaattccgcatcctttagtaccttcaaatgttacggtgtgagccccaccaaactcaatgatctctgtttcacaaacgtgtacgcagatagtttcgttatacgcggggacgaagtacggcagatagcccctggccagacaggaaagatagccgattacaactacaaacttccagacgattttacagggtgtgtgatcgcttggaattcaaataacctggactccaaagtgggaggcaactataattacctgtaccgactgttccgcaaaagcaacttgaaacctttcgagcgagatatatcaaccgaaatctaccaagctggttctacaccttgtaatggtgtggagggatttaactgctacttccctcttcagtcctatggatttcagcctacaaatggagtcgggtatcaaccctatagagtcgtggtgttgtcatttgaacttctccatgcacctgctactgtctgtggtccaaaaaagtccactaatcttgtaaaaaacaaatgcgtgaacttcaatttcaatggcctcaccggaacaggtgttttgacagaatctaacaaaaaattccttcccttccagcaattcgggagagatggatccggcggcggcggtgacggtggtggcggctccggagacaagacccacacctgccccccttgtcctgcccctgagctgctgggcggaccctccgtgtttctgttcccccccaagcccaaggacaccctgatgatcagccggacccccgaggtcacctgcgtggtggtggacgtcagccacgaggacccagaggtcaagttcaattggtatgtggacggcgtggaggtgcacaacgccaagaccaagccccgggaggaacagtacaacagcacctaccgggtggtgtccgtgctgaccgtgctgcaccaggactggctgaacggcaaagaatacaagtgcaaggtgtccaacaaggccctgcctgcccccatcgagaaaaccatcagcaaggccaagggccagcccagagaaccccaggtgtacaccctgccccctagcagggaagagctgaccaagaaccaggtgtccctgacctgtctggtcaagggcttctaccccagcgatatcgccgtggagtgggagagcaacggccagcctgagaacaactacaagaccaccccccctgtgctggacagcgacggcagcttcttcctgtacagcaagctgaccgtggacaagagccggtggcagcagggcaacgtgtttagctgcagcgtgatgcacgaggccctgcacaaccactacacccagaagagcttaagcctgtcccctggcagt

SEQ ID NO: 1874 - DNA, 1341 bp, synthetic construct
  source 1..1341: mol_type = other DNA
gttgcagactatagcgtgctttacaattccgcatcctttagtaccttcaaatgttacggtgtgagccccaccaaactcaatgatctctgtttcacaaacgtgtacgcagatagtttcgttatacgcggggacgaagtacggcagatagcccctggccagacaggaaagatagccgattacaactacaaacttccagacgattttacagggtgtgtgatcgcttggaattcaaataacctggactccaaagtgggaggcaactataattacctgtaccgactgttccgcaaaagcaacttgaaacctttcgagcgagatatatcaaccgaaatctaccaagctggttctacaccttgtaatggtgtggagggatttaactgctacttccctcttcagtcctatggatttcagcctacaaatggagtcgggtatcaaccctatagagtcgtggtgttgtcatttgaacttctccatgcacctgctactgtctgtggtccaaaaaagtccactaatcttgtaaaaaacaaatgcgtgaacttcaatttcaatggcctcaccggaacaggtgttttgacagaatctaacaaaaaattccttcccttccagcaattcgggagagatggatccggcggcggcggtgacggtggtggcggctccggagacaagacccacacctgccccccttgtcctgcccctgagctgctgggcggaccctccgtgtttctgttcccccccaagcccaaggacaccctgatgatcagccggacccccgaggtcacctgcgtggtggtggacgtcagccacgaggacccagaggtcaagttcaattggtatgtggacggcgtggaggtgcacaacgccaagaccaagccccgggaggaacagtacaacagcacctaccgggtggtgtccgtgctgaccgtgctgcaccaggactggctgaacggcaaagaatacaagtgcaaggtgtccaacaaggccctgcctgcccccatcgagaaaaccatcagcaaggccaagggccagcccagagaaccccaggtgtacaccctgccccctagcagggaagagctgaccaagaaccaggtgtccctgacctgtctggtcaagggcttctaccccagcgatatcgccgtggagtgggagagcaacggccagcctgagaacaactacaagaccaccccccctgtgctggacagcgacggcagcttcttcctgtacagcaagctgaccgtggacaagagccggtggcagcagggcaacgtgtttagctgcagcgtgatgcacgaggccctgcacaaccactacacccagaagagcttaagcctgtcccctggcagt

SEQ ID NO: 1875 - DNA, 1338 bp, synthetic construct
  source 1..1338: mol_type = other DNA
gcagactatagcgtgctttacaattccgcatcctttagtaccttcaaatgttacggtgtgagccccaccaaactcaatgatctctgtttcacaaacgtgtacgcagatagtttcgttatacgcggggacgaagtacggcagatagcccctggccagacaggaaagatagccgattacaactacaaacttccagacgattttacagggtgtgtgatcgcttggaattcaaataacctggactccaaagtgggaggcaactataattacctgtaccgactgttccgcaaaagcaacttgaaacctttcgagcgagatatatcaaccgaaatctaccaagctggttctacaccttgtaatggtgtggagggatttaactgctacttccctcttcagtcctatggatttcagcctacaaatggagtcgggtatcaaccctatagagtcgtggtgttgtcatttgaacttctccatgcacctgctactgtctgtggtccaaaaaagtccactaatcttgtaaaaaacaaatgcgtgaacttcaatttcaatggcctcaccggaacaggtgttttgacagaatctaacaaaaaattccttcccttccagcaattcgggagagatggatccggcggcggcggtgacggtggtggcggctccggagacaagacccacacctgccccccttgtcctgcccctgagctgctgggcggaccctccgtgtttctgttcccccccaagcccaaggacaccctgatgatcagccggacccccgaggtcacctgcgtggtggtggacgtcagccacgaggacccagaggtcaagttcaattggtatgtggacggcgtggaggtgcacaacgccaagaccaagccccgggaggaacagtacaacagcacctaccgggtggtgtccgtgctgaccgtgctgcaccaggactggctgaacggcaaagaatacaagtgcaaggtgtccaacaaggccctgcctgcccccatcgagaaaaccatcagcaaggccaagggccagcccagagaaccccaggtgtacaccctgccccctagcagggaagagctgaccaagaaccaggtgtccctgacctgtctggtcaagggcttctaccccagcgatatcgccgtggagtgggagagcaacggccagcctgagaacaactacaagaccaccccccctgtgctggacagcgacggcagcttcttcctgtacagcaagctgaccgtggacaagagccggtggcagcagggcaacgtgtttagctgcagcgtgatgcacgaggccctgcacaaccactacacccagaagagcttaagcctgtcccctggcagt

SEQ ID NO: 1876 - DNA, 1335 bp, synthetic construct
  source 1..1335: mol_type = other DNA
gactatagcgtgctttacaattccgcatcctttagtaccttcaaatgttacggtgtgagccccaccaaactcaatgatctctgtttcacaaacgtgtacgcagatagtttcgttatacgcggggacgaagtacggcagatagcccctggccagacaggaaagatagccgattacaactacaaacttccagacgattttacagggtgtgtgatcgcttggaattcaaataacctggactccaaagtgggaggcaactataattacctgtaccgactgttccgcaaaagcaacttgaaacctttcgagcgagatatatcaaccgaaatctaccaagctggttctacaccttgtaatggtgtggagggatttaactgctacttccctcttcagtcctatggatttcagcctacaaatggagtcgggtatcaaccctatagagtcgtggtgttgtcatttgaacttctccatgcacctgctactgtctgtggtccaaaaaagtccactaatcttgtaaaaaacaaatgcgtgaacttcaatttcaatggcctcaccggaacaggtgttttgacagaatctaacaaaaaattccttcccttccagcaattcgggagagatggatccggcggcggcggtgacggtggtggcggctccggagacaagacccacacctgccccccttgtcctgcccctgagctgctgggcggaccctccgtgtttctgttcccccccaagcccaaggacaccctgatgatcagccggacccccgaggtcacctgcgtggtggtggacgtcagccacgaggacccagaggtcaagttcaattggtatgtggacggcgtggaggtgcacaacgccaagaccaagccccgggaggaacagtacaacagcacctaccgggtggtgtccgtgctgaccgtgctgcaccaggactggctgaacggcaaagaatacaagtgcaaggtgtccaacaaggccctgcctgcccccatcgagaaaaccatcagcaaggccaagggccagcccagagaaccccaggtgtacaccctgccccctagcagggaagagctgaccaagaaccaggtgtccctgacctgtctggtcaagggcttctaccccagcgatatcgccgtggagtgggagagcaacggccagcctgagaacaactacaagaccaccccccctgtgctggacagcgacggcagcttcttcctgtacagcaagctgaccgtggacaagagccggtggcagcagggcaacgtgtttagctgcagcgtgatgcacgaggccctgcacaaccactacacccagaagagcttaagcctgtcccctggcagt

SEQ ID NO: 1877 - DNA, 1332 bp, synthetic construct
  source 1..1332: mol_type = other DNA
tatagcgtgctttacaattccgcatcctttagtaccttcaaatgttacggtgtgagccccaccaaactcaatgatctctgtttcacaaacgtgtacgcagatagtttcgttatacgcggggacgaagtacggcagatagcccctggccagacaggaaagatagccgattacaactacaaacttccagacgattttacagggtgtgtgatcgcttggaattcaaataacctggactccaaagtgggaggcaactataattacctgtaccgactgttccgcaaaagcaacttgaaacctttcgagcgagatatatcaaccgaaatctaccaagctggttctacaccttgtaatggtgtggagggatttaactgctacttccctcttcagtcctatggatttcagcctacaaatggagtcgggtatcaaccctatagagtcgtggtgttgtcatttgaacttctccatgcacctgctactgtctgtggtccaaaaaagtccactaatcttgtaaaaaacaaatgcgtgaacttcaatttcaatggcctcaccggaacaggtgttttgacagaatctaacaaaaaattccttcccttccagcaattcgggagagatggatccggcggcggcggtgacggtggtggcggctccggagacaagacccacacctgccccccttgtcctgcccctgagctgctgggcggaccctccgtgtttctgttcccccccaagcccaaggacaccctgatgatcagccggacccccgaggtcacctgcgtggtggtggacgtcagccacgaggacccagaggtcaagttcaattggtatgtggacggcgtggaggtgcacaacgccaagaccaagccccgggaggaacagtacaacagcacctaccgggtggtgtccgtgctgaccgtgctgcaccaggactggctgaacggcaaagaatacaagtgcaaggtgtccaacaaggccctgcctgcccccatcgagaaaaccatcagcaaggccaagggccagcccagagaaccccaggtgtacaccctgccccctagcagggaagagctgaccaagaaccaggtgtccctgacctgtctggtcaagggcttctaccccagcgatatcgccgtggagtgggagagcaacggccagcctgagaacaactacaagaccaccccccctgtgctggacagcgacggcagcttcttcctgtacagcaagctgaccgtggacaagagccggtggcagcagggcaacgtgtttagctgcagcgtgatgcacgaggccctgcacaaccactacacccagaagagcttaagcctgtcccctggcagt

SEQ ID NO: 1878 - DNA, 1329 bp, synthetic construct
  source 1..1329: mol_type = other DNA
agcgtgctttacaattccgcatcctttagtaccttcaaatgttacggtgtgagccccaccaaactcaatgatctctgtttcacaaacgtgtacgcagatagtttcgttatacgcggggacgaagtacggcagatagcccctggccagacaggaaagatagccgattacaactacaaacttccagacgattttacagggtgtgtgatcgcttggaattcaaataacctggactccaaagtgggaggcaactataattacctgtaccgactgttccgcaaaagcaacttgaaacctttcgagcgagatatatcaaccgaaatctaccaagctggttctacaccttgtaatggtgtggagggatttaactgctacttccctcttcagtcctatggatttcagcctacaaatggagtcgggtatcaaccctatagagtcgtggtgttgtcatttgaacttctccatgcacctgctactgtctgtggtccaaaaaagtccactaatcttgtaaaaaacaaatgcgtgaacttcaatttcaatggcctcaccggaacaggtgttttgacagaatctaacaaaaaattccttcccttccagcaattcgggagagatggatccggcggcggcggtgacggtggtggcggctccggagacaagacccacacctgccccccttgtcctgcccctgagctgctgggcggaccctccgtgtttctgttcccccccaagcccaaggacaccctgatgatcagccggacccccgaggtcacctgcgtggtggtggacgtcagccacgaggacccagaggtcaagttcaattggtatgtggacggcgtggaggtgcacaacgccaagaccaagccccgggaggaacagtacaacagcacctaccgggtggtgtccgtgctgaccgtgctgcaccaggactggctgaacggcaaagaatacaagtgcaaggtgtccaacaaggccctgcctgcccccatcgagaaaaccatcagcaaggccaagggccagcccagagaaccccaggtgtacaccctgccccctagcagggaagagctgaccaagaaccaggtgtccctgacctgtctggtcaagggcttctaccccagcgatatcgccgtggagtgggagagcaacggccagcctgagaacaactacaagaccaccccccctgtgctggacagcgacggcagcttcttcctgtacagcaagctgaccgtggacaagagccggtggcagcagggcaacgtgtttagctgcagcgtgatgcacgaggccctgcacaaccactacacccagaagagcttaagcctgtcccctggcagt

SEQ ID NO: 1879 - DNA, 1467 bp, synthetic construct
  source 1..1467: mol_type = other DNA
agggttcagcccaccgaatcaatagtacggttcccaaatatcactaatctttgccccttcggggaagtatttaacgctactcgatttgctagcgtatatgcctggaaccggaagagaataagcaactgtgttgcagactatagcgtgctttacaattccgcatcctttagtaccttcaaatgttacggtgtgagccccaccaaactcaatgatctctgtttcacaaacgtgtacgcagatagtttcgttatacgcggggacgaagtacggcagatagcccctggccagacaggaaagatagccgattacaactacaaacttccagacgattttacagggtgtgtgatcgcttggaattcaaataacctggactccaaagtgggaggcaactataattacctgtaccgactgttccgcaaaagcaacttgaaacctttcgagcgagatatatcaaccgaaatctaccaagctggttctacaccttgtaatggtgtggagggatttaactgctacttccctcttcagtcctatggatttcagcctacaaatggagtcgggtatcaaccctatagagtcgtggtgttgtcatttgaacttctccatgcacctgctactgtctgtggtccaaaaaagtccactaatcttgtaaaaaacaaatgcgtgaacttcaatttcaatggcctcaccggaacaggtgttttgacagaatctaacaaaaaattccttcccttccagcaattcgggagaggatccggcggcggcggtgacggtggtggcggctccggagacaagacccacacctgccccccttgtcctgcccctgagctgctgggcggaccctccgtgtttctgttcccccccaagcccaaggacaccctgatgatcagccggacccccgaggtcacctgcgtggtggtggacgtcagccacgaggacccagaggtcaagttcaattggtatgtggacggcgtggaggtgcacaacgccaagaccaagccccgggaggaacagtacaacagcacctaccgggtggtgtccgtgctgaccgtgctgcaccaggactggctgaacggcaaagaatacaagtgcaaggtgtccaacaaggccctgcctgcccccatcgagaaaaccatcagcaaggccaagggccagcccagagaaccccaggtgtacaccctgccccctagcagggaagagctgaccaagaaccaggtgtccctgacctgtctggtcaagggcttctaccccagcgatatcgccgtggagtgggagagcaacggccagcctgagaacaactacaagaccaccccccctgtgctggacagcgacggcagcttcttcctgtacagcaagctgaccgtggacaagagccggtggcagcagggcaacgtgtttagctgcagcgtgatgcacgaggccctgcacaaccactacacccagaagagcttaagcctgtcccctggcagt

SEQ ID NO: 1880 - DNA, 1464 bp, synthetic construct
  source 1..1464: mol_type = other DNA
agggttcagcccaccgaatcaatagtacggttcccaaatatcactaatctttgccccttcggggaagtatttaacgctactcgatttgctagcgtatatgcctggaaccggaagagaataagcaactgtgttgcagactatagcgtgctttacaattccgcatcctttagtaccttcaaatgttacggtgtgagccccaccaaactcaatgatctctgtttcacaaacgtgtacgcagatagtttcgttatacgcggggacgaagtacggcagatagcccctggccagacaggaaagatagccgattacaactacaaacttccagacgattttacagggtgtgtgatcgcttggaattcaaataacctggactccaaagtgggaggcaactataattacctgtaccgactgttccgcaaaagcaacttgaaacctttcgagcgagatatatcaaccgaaatctaccaagctggttctacaccttgtaatggtgtggagggatttaactgctacttccctcttcagtcctatggatttcagcctacaaatggagtcgggtatcaaccctatagagtcgtggtgttgtcatttgaacttctccatgcacctgctactgtctgtggtccaaaaaagtccactaatcttgtaaaaaacaaatgcgtgaacttcaatttcaatggcctcaccggaacaggtgttttgacagaatctaacaaaaaattccttcccttccagcaattcgggggatccggcggcggcggtgacggtggtggcggctccggagacaagacccacacctgccccccttgtcctgcccctgagctgctgggcggaccctccgtgtttctgttcccccccaagcccaaggacaccctgatgatcagccggacccccgaggtcacctgcgtggtggtggacgtcagccacgaggacccagaggtcaagttcaattggtatgtggacggcgtggaggtgcacaacgccaagaccaagccccgggaggaacagtacaacagcacctaccgggtggtgtccgtgctgaccgtgctgcaccaggactggctgaacggcaaagaatacaagtgcaaggtgtccaacaaggccctgcctgcccccatcgagaaaaccatcagcaaggccaagggccagcccagagaaccccaggtgtacaccctgccccctagcagggaagagctgaccaagaaccaggtgtccctgacctgtctggtcaagggcttctaccccagcgatatcgccgtggagtgggagagcaacggccagcctgagaacaactacaagaccaccccccctgtgctggacagcgacggcagcttcttcctgtacagcaagctgaccgtggacaagagccggtggcagcagggcaacgtgtttagctgcagcgtgatgcacgaggccctgcacaaccactacacccagaagagcttaagcctgtcccctggcagt

SEQ ID NO: 1881 - DNA, 1461 bp, synthetic construct
  source 1..1461: mol_type = other DNA
agggttcagcccaccgaatcaatagtacggttcccaaatatcactaatctttgccccttcggggaagtatttaacgctactcgatttgctagcgtatatgcctggaaccggaagagaataagcaactgtgttgcagactatagcgtgctttacaattccgcatcctttagtaccttcaaatgttacggtgtgagccccaccaaactcaatgatctctgtttcacaaacgtgtacgcagatagtttcgttatacgcggggacgaagtacggcagatagcccctggccagacaggaaagatagccgattacaactacaaacttccagacgattttacagggtgtgtgatcgcttggaattcaaataacctggactccaaagtgggaggcaactataattacctgtaccgactgttccgcaaaagcaacttgaaacctttcgagcgagatatatcaaccgaaatctaccaagctggttctacaccttgtaatggtgtggagggatttaactgctacttccctcttcagtcctatggatttcagcctacaaatggagtcgggtatcaaccctatagagtcgtggtgttgtcatttgaacttctccatgcacctgctactgtctgtggtccaaaaaagtccactaatcttgtaaaaaacaaatgcgtgaacttcaatttcaatggcctcaccggaacaggtgttttgacagaatctaacaaaaaattccttcccttccagcaattcggatccggcggcggcggtgacggtggtggcggctccggagacaagacccacacctgccccccttgtcctgcccctgagctgctgggcggaccctccgtgtttctgttcccccccaagcccaaggacaccctgatgatcagccggacccccgaggtcacctgcgtggtggtggacgtcagccacgaggacccagaggtcaagttcaattggtatgtggacggcgtggaggtgcacaacgccaagaccaagccccgggaggaacagtacaacagcacctaccgggtggtgtccgtgctgaccgtgctgcaccaggactggctgaacggcaaagaatacaagtgcaaggtgtccaacaaggccctgcctgcccccatcgagaaaaccatcagcaaggccaagggccagcccagagaaccccaggtgtacaccctgccccctagcagggaagagctgaccaagaaccaggtgtccctgacctgtctggtcaagggcttctaccccagcgatatcgccgtggagtgggagagcaacggccagcctgagaacaactacaagaccaccccccctgtgctggacagcgacggcagcttcttcctgtacagcaagctgaccgtggacaagagccggtggcagcagggcaacgtgtttagctgcagcgtgatgcacgaggccctgcacaaccactacacccagaagagcttaagcctgtcccctggcagt

SEQ ID NO: 1882 - DNA, 1458 bp, synthetic construct
  source 1..1458: mol_type = other DNA
agggttcagcccaccgaatcaatagtacggttcccaaatatcactaatctttgccccttcggggaagtatttaacgctactcgatttgctagcgtatatgcctggaaccggaagagaataagcaactgtgttgcagactatagcgtgctttacaattccgcatcctttagtaccttcaaatgttacggtgtgagccccaccaaactcaatgatctctgtttcacaaacgtgtacgcagatagtttcgttatacgcggggacgaagtacggcagatagcccctggccagacaggaaagatagccgattacaactacaaacttccagacgattttacagggtgtgtgatcgcttggaattcaaataacctggactccaaagtgggaggcaactataattacctgtaccgactgttccgcaaaagcaacttgaaacctttcgagcgagatatatcaaccgaaatctaccaagctggttctacaccttgtaatggtgtggagggatttaactgctacttccctcttcagtcctatggatttcagcctacaaatggagtcgggtatcaaccctatagagtcgtggtgttgtcatttgaacttctccatgcacctgctactgtctgtggtccaaaaaagtccactaatcttgtaaaaaacaaatgcgtgaacttcaatttcaatggcctcaccggaacaggtgttttgacagaatctaacaaaaaattccttcccttccagcaaggatccggcggcggcggtgacggtggtggcggctccggagacaagacccacacctgccccccttgtcctgcccctgagctgctgggcggaccctccgtgtttctgttcccccccaagcccaaggacaccctgatgatcagccggacccccgaggtcacctgcgtggtggtggacgtcagccacgaggacccagaggtcaagttcaattggtatgtggacggcgtggaggtgcacaacgccaagaccaagccccgggaggaacagtacaacagcacctaccgggtggtgtccgtgctgaccgtgctgcaccaggactggctgaacggcaaagaatacaagtgcaaggtgtccaacaaggccctgcctgcccccatcgagaaaaccatcagcaaggccaagggccagcccagagaaccccaggtgtacaccctgccccctagcagggaagagctgaccaagaaccaggtgtccctgacctgtctggtcaagggcttctaccccagcgatatcgccgtggagtgggagagcaacggccagcctgagaacaactacaagaccaccccccctgtgctggacagcgacggcagcttcttcctgtacagcaagctgaccgtggacaagagccggtggcagcagggcaacgtgtttagctgcagcgtgatgcacgaggccctgcacaaccactacacccagaagagcttaagcctgtcccctggcagt

SEQ ID NO: 1883 - DNA, 1455 bp, synthetic construct
  source 1..1455: mol_type = other DNA
agggttcagcccaccgaatcaatagtacggttcccaaatatcactaatctttgccccttcggggaagtatttaacgctactcgatttgctagcgtatatgcctggaaccggaagagaataagcaactgtgttgcagactatagcgtgctttacaattccgcatcctttagtaccttcaaatgttacggtgtgagccccaccaaactcaatgatctctgtttcacaaacgtgtacgcagatagtttcgttatacgcggggacgaagtacggcagatagcccctggccagacaggaaagatagccgattacaactacaaacttccagacgattttacagggtgtgtgatcgcttggaattcaaataacctggactccaaagtgggaggcaactataattacctgtaccgactgttccgcaaaagcaacttgaaacctttcgagcgagatatatcaaccgaaatctaccaagctggttctacaccttgtaatggtgtggagggatttaactgctacttccctcttcagtcctatggatttcagcctacaaatggagtcgggtatcaaccctatagagtcgtggtgttgtcatttgaacttctccatgcacctgctactgtctgtggtccaaaaaagtccactaatcttgtaaaaaacaaatgcgtgaacttcaatttcaatggcctcaccggaacaggtgttttgacagaatctaacaaaaaattccttcccttccagggatccggcggcggcggtgacggtggtggcggctccggagacaagacccacacctgccccccttgtcctgcccctgagctgctgggcggaccctccgtgtttctgttcccccccaagcccaaggacaccctgatgatcagccggacccccgaggtcacctgcgtggtggtggacgtcagccacgaggacccagaggtcaagttcaattggtatgtggacggcgtggaggtgcacaacgccaagaccaagccccgggaggaacagtacaacagcacctaccgggtggtgtccgtgctgaccgtgctgcaccaggactggctgaacggcaaagaatacaagtgcaaggtgtccaacaaggccctgcctgcccccatcgagaaaaccatcagcaaggccaagggccagcccagagaaccccaggtgtacaccctgccccctagcagggaagagctgaccaagaaccaggtgtccctgacctgtctggtcaagggcttctaccccagcgatatcgccgtggagtgggagagcaacggccagcctgagaacaactacaagaccaccccccctgtgctggacagcgacggcagcttcttcctgtacagcaagctgaccgtggacaagagccggtggcagcagggcaacgtgtttagctgcagcgtgatgcacgaggccctgcacaaccactacacccagaagagcttaagcctgtcccctggcagt

SEQ ID NO: 1884 - DNA, 1452 bp, synthetic construct
  source 1..1452: mol_type = other DNA
agggttcagcccaccgaatcaatagtacggttcccaaatatcactaatctttgccccttcggggaagtatttaacgctactcgatttgctagcgtatatgcctggaaccggaagagaataagcaactgtgttgcagactatagcgtgctttacaattccgcatcctttagtaccttcaaatgttacggtgtgagccccaccaaactcaatgatctctgtttcacaaacgtgtacgcagatagtttcgttatacgcggggacgaagtacggcagatagcccctggccagacaggaaagatagccgattacaactacaaacttccagacgattttacagggtgtgtgatcgcttggaattcaaataacctggactccaaagtgggaggcaactataattacctgtaccgactgttccgcaaaagcaacttgaaacctttcgagcgagatatatcaaccgaaatctaccaagctggttctacaccttgtaatggtgtggagggatttaactgctacttccctcttcagtcctatggatttcagcctacaaatggagtcgggtatcaaccctatagagtcgtggtgttgtcatttgaacttctccatgcacctgctactgtctgtggtccaaaaaagtccactaatcttgtaaaaaacaaatgcgtgaacttcaatttcaatggcctcaccggaacaggtgttttgacagaatctaacaaaaaattccttcccttcggatccggcggcggcggtgacggtggtggcggctccggagacaagacccacacctgccccccttgtcctgcccctgagctgctgggcggaccctccgtgtttctgttcccccccaagcccaaggacaccctgatgatcagccggacccccgaggtcacctgcgtggtggtggacgtcagccacgaggacccagaggtcaagttcaattggtatgtggacggcgtggaggtgcacaacgccaagaccaagccccgggaggaacagtacaacagcacctaccgggtggtgtccgtgctgaccgtgctgcaccaggactggctgaacggcaaagaatacaagtgcaaggtgtccaacaaggccctgcctgcccccatcgagaaaaccatcagcaaggccaagggccagcccagagaaccccaggtgtacaccctgccccctagcagggaagagctgaccaagaaccaggtgtccctgacctgtctggtcaagggcttctaccccagcgatatcgccgtggagtgggagagcaacggccagcctgagaacaactacaagaccaccccccctgtgctggacagcgacggcagcttcttcctgtacagcaagctgaccgtggacaagagccggtggcagcagggcaacgtgtttagctgcagcgtgatgcacgaggccctgcacaaccactacacccagaagagcttaagcctgtcccctggcagt

SEQ ID NO: 1885 - DNA, 1449 bp, synthetic construct
  source 1..1449: mol_type = other DNA
agggttcagcccaccgaatcaatagtacggttcccaaatatcactaatctttgccccttcggggaagtatttaacgctactcgatttgctagcgtatatgcctggaaccggaagagaataagcaactgtgttgcagactatagcgtgctttacaattccgcatcctttagtaccttcaaatgttacggtgtgagccccaccaaactcaatgatctctgtttcacaaacgtgtacgcagatagtttcgttatacgcggggacgaagtacggcagatagcccctggccagacaggaaagatagccgattacaactacaaacttccagacgattttacagggtgtgtgatcgcttggaattcaaataacctggactccaaagtgggaggcaactataattacctgtaccgactgttccgcaaaagcaacttgaaacctttcgagcgagatatatcaaccgaaatctaccaagctggttctacaccttgtaatggtgtggagggatttaactgctacttccctcttcagtcctatggatttcagcctacaaatggagtcgggtatcaaccctatagagtcgtggtgttgtcatttgaacttctccatgcacctgctactgtctgtggtccaaaaaagtccactaatcttgtaaaaaacaaatgcgtgaacttcaatttcaatggcctcaccggaacaggtgttttgacagaatctaacaaaaaattccttcccggatccggcggcggcggtgacggtggtggcggctccggagacaagacccacacctgccccccttgtcctgcccctgagctgctgggcggaccctccgtgtttctgttcccccccaagcccaaggacaccctgatgatcagccggacccccgaggtcacctgcgtggtggtggacgtcagccacgaggacccagaggtcaagttcaattggtatgtggacggcgtggaggtgcacaacgccaagaccaagccccgggaggaacagtacaacagcacctaccgggtggtgtccgtgctgaccgtgctgcaccaggactggctgaacggcaaagaatacaagtgcaaggtgtccaacaaggccctgcctgcccccatcgagaaaaccatcagcaaggccaagggccagcccagagaaccccaggtgtacaccctgccccctagcagggaagagctgaccaagaaccaggtgtccctgacctgtctggtcaagggcttctaccccagcgatatcgccgtggagtgggagagcaacggccagcctgagaacaactacaagaccaccccccctgtgctggacagcgacggcagcttcttcctgtacagcaagctgaccgtggacaagagccggtggcagcagggcaacgtgtttagctgcagcgtgatgcacgaggccctgcacaaccactacacccagaagagcttaagcctgtcccctggcagt

SEQ ID NO: 1886 - DNA, 1446 bp, synthetic construct
  source 1..1446: mol_type = other DNA
agggttcagcccaccgaatcaatagtacggttcccaaatatcactaatctttgccccttcggggaagtatttaacgctactcgatttgctagcgtatatgcctggaaccggaagagaataagcaactgtgttgcagactatagcgtgctttacaattccgcatcctttagtaccttcaaatgttacggtgtgagccccaccaaactcaatgatctctgtttcacaaacgtgtacgcagatagtttcgttatacgcggggacgaagtacggcagatagcccctggccagacaggaaagatagccgattacaactacaaacttccagacgattttacagggtgtgtgatcgcttggaattcaaataacctggactccaaagtgggaggcaactataattacctgtaccgactgttccgcaaaagcaacttgaaacctttcgagcgagatatatcaaccgaaatctaccaagctggttctacaccttgtaatggtgtggagggatttaactgctacttccctcttcagtcctatggatttcagcctacaaatggagtcgggtatcaaccctatagagtcgtggtgttgtcatttgaacttctccatgcacctgctactgtctgtggtccaaaaaagtccactaatcttgtaaaaaacaaatgcgtgaacttcaatttcaatggcctcaccggaacaggtgttttgacagaatctaacaaaaaattccttggatccggcggcggcggtgacggtggtggcggctccggagacaagacccacacctgccccccttgtcctgcccctgagctgctgggcggaccctccgtgtttctgttcccccccaagcccaaggacaccctgatgatcagccggacccccgaggtcacctgcgtggtggtggacgtcagccacgaggacccagaggtcaagttcaattggtatgtggacggcgtggaggtgcacaacgccaagaccaagccccgggaggaacagtacaacagcacctaccgggtggtgtccgtgctgaccgtgctgcaccaggactggctgaacggcaaagaatacaagtgcaaggtgtccaacaaggccctgcctgcccccatcgagaaaaccatcagcaaggccaagggccagcccagagaaccccaggtgtacaccctgccccctagcagggaagagctgaccaagaaccaggtgtccctgacctgtctggtcaagggcttctaccccagcgatatcgccgtggagtgggagagcaacggccagcctgagaacaactacaagaccaccccccctgtgctggacagcgacggcagcttcttcctgtacagcaagctgaccgtggacaagagccggtggcagcagggcaacgtgtttagctgcagcgtgatgcacgaggccctgcacaaccactacacccagaagagcttaagcctgtcccctggcagt

SEQ ID NO: 1887 - DNA, 1443 bp, synthetic construct
  source 1..1443: mol_type = other DNA
agggttcagcccaccgaatcaatagtacggttcccaaatatcactaatctttgccccttcggggaagtatttaacgctactcgatttgctagcgtatatgcctggaaccggaagagaataagcaactgtgttgcagactatagcgtgctttacaattccgcatcctttagtaccttcaaatgttacggtgtgagccccaccaaactcaatgatctctgtttcacaaacgtgtacgcagatagtttcgttatacgcggggacgaagtacggcagatagcccctggccagacaggaaagatagccgattacaactacaaacttccagacgattttacagggtgtgtgatcgcttggaattcaaataacctggactccaaagtgggaggcaactataattacctgtaccgactgttccgcaaaagcaacttgaaacctttcgagcgagatatatcaaccgaaatctaccaagctggttctacaccttgtaatggtgtggagggatttaactgctacttccctcttcagtcctatggatttcagcctacaaatggagtcgggtatcaaccctatagagtcgtggtgttgtcatttgaacttctccatgcacctgctactgtctgtggtccaaaaaagtccactaatcttgtaaaaaacaaatgcgtgaacttcaatttcaatggcctcaccggaacaggtgttttgacagaatctaacaaaaaattcggatccggcggcggcggtgacggtggtggcggctccggagacaagacccacacctgccccccttgtcctgcccctgagctgctgggcggaccctccgtgtttctgttcccccccaagcccaaggacaccctgatgatcagccggacccccgaggtcacctgcgtggtggtggacgtcagccacgaggacccagaggtcaagttcaattggtatgtggacggcgtggaggtgcacaacgccaagaccaagccccgggaggaacagtacaacagcacctaccgggtggtgtccgtgctgaccgtgctgcaccaggactggctgaacggcaaagaatacaagtgcaaggtgtccaacaaggccctgcctgcccccatcgagaaaaccatcagcaaggccaagggccagcccagagaaccccaggtgtacaccctgccccctagcagggaagagctgaccaagaaccaggtgtccctgacctgtctggtcaagggcttctaccccagcgatatcgccgtggagtgggagagcaacggccagcctgagaacaactacaagaccaccccccctgtgctggacagcgacggcagcttcttcctgtacagcaagctgaccgtggacaagagccggtggcagcagggcaacgtgtttagctgcagcgtgatgcacgaggccctgcacaaccactacacccagaagagcttaagcctgtcccctggcagt

SEQ ID NO: 1888 - DNA, 1440 bp, synthetic construct
  source 1..1440: mol_type = other DNA
agggttcagcccaccgaatcaatagtacggttcccaaatatcactaatctttgccccttcggggaagtatttaacgctactcgatttgctagcgtatatgcctggaaccggaagagaataagcaactgtgttgcagactatagcgtgctttacaattccgcatcctttagtaccttcaaatgttacggtgtgagccccaccaaactcaatgatctctgtttcacaaacgtgtacgcagatagtttcgttatacgcggggacgaagtacggcagatagcccctggccagacaggaaagatagccgattacaactacaaacttccagacgattttacagggtgtgtgatcgcttggaattcaaataacctggactccaaagtgggaggcaactataattacctgtaccgactgttccgcaaaagcaacttgaaacctttcgagcgagatatatcaaccgaaatctaccaagctggttctacaccttgtaatggtgtggagggatttaactgctacttccctcttcagtcctatggatttcagcctacaaatggagtcgggtatcaaccctatagagtcgtggtgttgtcatttgaacttctccatgcacctgctactgtctgtggtccaaaaaagtccactaatcttgtaaaaaacaaatgcgtgaacttcaatttcaatggcctcaccggaacaggtgttttgacagaatctaacaaaaaaggatccggcggcggcggtgacggtggtggcggctccggagacaagacccacacctgccccccttgtcctgcccctgagctgctgggcggaccctccgtgtttctgttcccccccaagcccaaggacaccctgatgatcagccggacccccgaggtcacctgcgtggtggtggacgtcagccacgaggacccagaggtcaagttcaattggtatgtggacggcgtggaggtgcacaacgccaagaccaagccccgggaggaacagtacaacagcacctaccgggtggtgtccgtgctgaccgtgctgcaccaggactggctgaacggcaaagaatacaagtgcaaggtgtccaacaaggccctgcctgcccccatcgagaaaaccatcagcaaggccaagggccagcccagagaaccccaggtgtacaccctgccccctagcagggaagagctgaccaagaaccaggtgtccctgacctgtctggtcaagggcttctaccccagcgatatcgccgtggagtgggagagcaacggccagcctgagaacaactacaagaccaccccccctgtgctggacagcgacggcagcttcttcctgtacagcaagctgaccgtggacaagagccggtggcagcagggcaacgtgtttagctgcagcgtgatgcacgaggccctgcacaaccactacacccagaagagcttaagcctgtcccctggcagt

SEQ ID NO: 1889 - DNA, 1437 bp, synthetic construct
  source 1..1437: mol_type = other DNA
agggttcagcccaccgaatcaatagtacggttcccaaatatcactaatctttgccccttcggggaagtatttaacgctactcgatttgctagcgtatatgcctggaaccggaagagaataagcaactgtgttgcagactatagcgtgctttacaattccgcatcctttagtaccttcaaatgttacggtgtgagccccaccaaactcaatgatctctgtttcacaaacgtgtacgcagatagtttcgttatacgcggggacgaagtacggcagatagcccctggccagacaggaaagatagccgattacaactacaaacttccagacgattttacagggtgtgtgatcgcttggaattcaaataacctggactccaaagtgggaggcaactataattacctgtaccgactgttccgcaaaagcaacttgaaacctttcgagcgagatatatcaaccgaaatctaccaagctggttctacaccttgtaatggtgtggagggatttaactgctacttccctcttcagtcctatggatttcagcctacaaatggagtcgggtatcaaccctatagagtcgtggtgttgtcatttgaacttctccatgcacctgctactgtctgtggtccaaaaaagtccactaatcttgtaaaaaacaaatgcgtgaacttcaatttcaatggcctcaccggaacaggtgttttgacagaatctaacaaaggatccggcggcggcggtgacggtggtggcggctccggagacaagacccacacctgccccccttgtcctgcccctgagctgctgggcggaccctccgtgtttctgttcccccccaagcccaaggacaccctgatgatcagccggacccccgaggtcacctgcgtggtggtggacgtcagccacgaggacccagaggtcaagttcaattggtatgtggacggcgtggaggtgcacaacgccaagaccaagccccgggaggaacagtacaacagcacctaccgggtggtgtccgtgctgaccgtgctgcaccaggactggctgaacggcaaagaatacaagtgcaaggtgtccaacaaggccctgcctgcccccatcgagaaaaccatcagcaaggccaagggccagcccagagaaccccaggtgtacaccctgccccctagcagggaagagctgaccaagaaccaggtgtccctgacctgtctggtcaagggcttctaccccagcgatatcgccgtggagtgggagagcaacggccagcctgagaacaactacaagaccaccccccctgtgctggacagcgacggcagcttcttcctgtacagcaagctgaccgtggacaagagccggtggcagcagggcaacgtgtttagctgcagcgtgatgcacgaggccctgcacaaccactacacccagaagagcttaagcctgtcccctggcagt

SEQ ID NO: 1890 - DNA, 1434 bp, synthetic construct
  source 1..1434: mol_type = other DNA
agggttcagcccaccgaatcaatagtacggttcccaaatatcactaatctttgccccttcggggaagtatttaacgctactcgatttgctagcgtatatgcctggaaccggaagagaataagcaactgtgttgcagactatagcgtgctttacaattccgcatcctttagtaccttcaaatgttacggtgtgagccccaccaaactcaatgatctctgtttcacaaacgtgtacgcagatagtttcgttatacgcggggacgaagtacggcagatagcccctggccagacaggaaagatagccgattacaactacaaacttccagacgattttacagggtgtgtgatcgcttggaattcaaataacctggactccaaagtgggaggcaactataattacctgtaccgactgttccgcaaaagcaacttgaaacctttcgagcgagatatatcaaccgaaatctaccaagctggttctacaccttgtaatggtgtggagggatttaactgctacttccctcttcagtcctatggatttcagcctacaaatggagtcgggtatcaaccctatagagtcgtggtgttgtcatttgaacttctccatgcacctgctactgtctgtggtccaaaaaagtccactaatcttgtaaaaaacaaatgcgtgaacttcaatttcaatggcctcaccggaacaggtgttttgacagaatctaacggatccggcggcggcggtgacggtggtggcggctccggagacaagacccacacctgccccccttgtcctgcccctgagctgctgggcggaccctccgtgtttctgttcccccccaagcccaaggacaccctgatgatcagccggacccccgaggtcacctgcgtggtggtggacgtcagccacgaggacccagaggtcaagttcaattggtatgtggacggcgtggaggtgcacaacgccaagaccaagccccgggaggaacagtacaacagcacctaccgggtggtgtccgtgctgaccgtgctgcaccaggactggctgaacggcaaagaatacaagtgcaaggtgtccaacaaggccctgcctgcccccatcgagaaaaccatcagcaaggccaagggccagcccagagaaccccaggtgtacaccctgccccctagcagggaagagctgaccaagaaccaggtgtccctgacctgtctggtcaagggcttctaccccagcgatatcgccgtggagtgggagagcaacggccagcctgagaacaactacaagaccaccccccctgtgctggacagcgacggcagcttcttcctgtacagcaagctgaccgtggacaagagccggtggcagcagggcaacgtgtttagctgcagcgtgatgcacgaggccctgcacaaccactacacccagaagagcttaagcctgtcccctggcagt

SEQ ID NO: 1891 - DNA, 1431 bp, synthetic construct
  source 1..1431: mol_type = other DNA
agggttcagcccaccgaatcaatagtacggttcccaaatatcactaatctttgccccttcggggaagtatttaacgctactcgatttgctagcgtatatgcctggaaccggaagagaataagcaactgtgttgcagactatagcgtgctttacaattccgcatcctttagtaccttcaaatgttacggtgtgagccccaccaaactcaatgatctctgtttcacaaacgtgtacgcagatagtttcgttatacgcggggacgaagtacggcagatagcccctggccagacaggaaagatagccgattacaactacaaacttccagacgattttacagggtgtgtgatcgcttggaattcaaataacctggactccaaagtgggaggcaactataattacctgtaccgactgttccgcaaaagcaacttgaaacctttcgagcgagatatatcaaccgaaatctaccaagctggttctacaccttgtaatggtgtggagggatttaactgctacttccctcttcagtcctatggatttcagcctacaaatggagtcgggtatcaaccctatagagtcgtggtgttgtcatttgaacttctccatgcacctgctactgtctgtggtccaaaaaagtccactaatcttgtaaaaaacaaatgcgtgaacttcaatttcaatggcctcaccggaacaggtgttttgacagaatctggatccggcggcggcggtgacggtggtggcggctccggagacaagacccacacctgccccccttgtcctgcccctgagctgctgggcggaccctccgtgtttctgttcccccccaagcccaaggacaccctgatgatcagccggacccccgaggtcacctgcgtggtggtggacgtcagccacgaggacccagaggtcaagttcaattggtatgtggacggcgtggaggtgcacaacgccaagaccaagccccgggaggaacagtacaacagcacctaccgggtggtgtccgtgctgaccgtgctgcaccaggactggctgaacggcaaagaatacaagtgcaaggtgtccaacaaggccctgcctgcccccatcgagaaaaccatcagcaaggccaagggccagcccagagaaccccaggtgtacaccctgccccctagcagggaagagctgaccaagaaccaggtgtccctgacctgtctggtcaagggcttctaccccagcgatatcgccgtggagtgggagagcaacggccagcctgagaacaactacaagaccaccccccctgtgctggacagcgacggcagcttcttcctgtacagcaagctgaccgtggacaagagccggtggcagcagggcaacgtgtttagctgcagcgtgatgcacgaggccctgcacaaccactacacccagaagagcttaagcctgtcccctggcagt

SEQ ID NO: 1892 - DNA, 1428 bp, synthetic construct
  source 1..1428: mol_type = other DNA
agggttcagcccaccgaatcaatagtacggttcccaaatatcactaatctttgccccttcggggaagtatttaacgctactcgatttgctagcgtatatgcctggaaccggaagagaataagcaactgtgttgcagactatagcgtgctttacaattccgcatcctttagtaccttcaaatgttacggtgtgagccccaccaaactcaatgatctctgtttcacaaacgtgtacgcagatagtttcgttatacgcggggacgaagtacggcagatagcccctggccagacaggaaagatagccgattacaactacaaacttccagacgattttacagggtgtgtgatcgcttggaattcaaataacctggactccaaagtgggaggcaactataattacctgtaccgactgttccgcaaaagcaacttgaaacctttcgagcgagatatatcaaccgaaatctaccaagctggttctacaccttgtaatggtgtggagggatttaactgctacttccctcttcagtcctatggatttcagcctacaaatggagtcgggtatcaaccctatagagtcgtggtgttgtcatttgaacttctccatgcacctgctactgtctgtggtccaaaaaagtccactaatcttgtaaaaaacaaatgcgtgaacttcaatttcaatggcctcaccggaacaggtgttttgacagaaggatccggcggcggcggtgacggtggtggcggctccggagacaagacccacacctgccccccttgtcctgcccctgagctgctgggcggaccctccgtgtttctgttcccccccaagcccaaggacaccctgatgatcagccggacccccgaggtcacctgcgtggtggtggacgtcagccacgaggacccagaggtcaagttcaattggtatgtggacggcgtggaggtgcacaacgccaagaccaagccccgggaggaacagtacaacagcacctaccgggtggtgtccgtgctgaccgtgctgcaccaggactggctgaacggcaaagaatacaagtgcaaggtgtccaacaaggccctgcctgcccccatcgagaaaaccatcagcaaggccaagggccagcccagagaaccccaggtgtacaccctgccccctagcagggaagagctgaccaagaaccaggtgtccctgacctgtctggtcaagggcttctaccccagcgatatcgccgtggagtgggagagcaacggccagcctgagaacaactacaagaccaccccccctgtgctggacagcgacggcagcttcttcctgtacagcaagctgaccgtggacaagagccggtggcagcagggcaacgtgtttagctgcagcgtgatgcacgaggccctgcacaaccactacacccagaagagcttaagcctgtcccctggcagt

SEQ ID NO: 1893 - DNA, 1425 bp, synthetic construct
  source 1..1425: mol_type = other DNA
agggttcagcccaccgaatcaatagtacggttcccaaatatcactaatctttgccccttcggggaagtatttaacgctactcgatttgctagcgtatatgcctggaaccggaagagaataagcaactgtgttgcagactatagcgtgctttacaattccgcatcctttagtaccttcaaatgttacggtgtgagccccaccaaactcaatgatctctgtttcacaaacgtgtacgcagatagtttcgttatacgcggggacgaagtacggcagatagcccctggccagacaggaaagatagccgattacaactacaaacttccagacgattttacagggtgtgtgatcgcttggaattcaaataacctggactccaaagtgggaggcaactataattacctgtaccgactgttccgcaaaagcaacttgaaacctttcgagcgagatatatcaaccgaaatctaccaagctggttctacaccttgtaatggtgtggagggatttaactgctacttccctcttcagtcctatggatttcagcctacaaatggagtcgggtatcaaccctatagagtcgtggtgttgtcatttgaacttctccatgcacctgctactgtctgtggtccaaaaaagtccactaatcttgtaaaaaacaaatgcgtgaacttcaatttcaatggcctcaccggaacaggtgttttgacaggatccggcggcggcggtgacggtggtggcggctccggagacaagacccacacctgccccccttgtcctgcccctgagctgctgggcggaccctccgtgtttctgttcccccccaagcccaaggacaccctgatgatcagccggacccccgaggtcacctgcgtggtggtggacgtcagccacgaggacccagaggtcaagttcaattggtatgtggacggcgtggaggtgcacaacgccaagaccaagccccgggaggaacagtacaacagcacctaccgggtggtgtccgtgctgaccgtgctgcaccaggactggctgaacggcaaagaatacaagtgcaaggtgtccaacaaggccctgcctgcccccatcgagaaaaccatcagcaaggccaagggccagcccagagaaccccaggtgtacaccctgccccctagcagggaagagctgaccaagaaccaggtgtccctgacctgtctggtcaagggcttctaccccagcgatatcgccgtggagtgggagagcaacggccagcctgagaacaactacaagaccaccccccctgtgctggacagcgacggcagcttcttcctgtacagcaagctgaccgtggacaagagccggtggcagcagggcaacgtgtttagctgcagcgtgatgcacgaggccctgcacaaccactacacccagaagagcttaagcctgtcccctggcagt

SEQ ID NO: 1894 - DNA, 1422 bp, synthetic construct
  source 1..1422: mol_type = other DNA
agggttcagcccaccgaatcaatagtacggttcccaaatatcactaatctttgccccttcggggaagtatttaacgctactcgatttgctagcgtatatgcctggaaccggaagagaataagcaactgtgttgcagactatagcgtgctttacaattccgcatcctttagtaccttcaaatgttacggtgtgagccccaccaaactcaatgatctctgtttcacaaacgtgtacgcagatagtttcgttatacgcggggacgaagtacggcagatagcccctggccagacaggaaagatagccgattacaactacaaacttccagacgattttacagggtgtgtgatcgcttggaattcaaataacctggactccaaagtgggaggcaactataattacctgtaccgactgttccgcaaaagcaacttgaaacctttcgagcgagatatatcaaccgaaatctaccaagctggttctacaccttgtaatggtgtggagggatttaactgctacttccctcttcagtcctatggatttcagcctacaaatggagtcgggtatcaaccctatagagtcgtggtgttgtcatttgaacttctccatgcacctgctactgtctgtggtccaaaaaagtccactaatcttgtaaaaaacaaatgcgtgaacttcaatttcaatggcctcaccggaacaggtgttttgggatccggcggcggcggtgacggtggtggcggctccggagacaagacccacacctgccccccttgtcctgcccctgagctgctgggcggaccctccgtgtttctgttcccccccaagcccaaggacaccctgatgatcagccggacccccgaggtcacctgcgtggtggtggacgtcagccacgaggacccagaggtcaagttcaattggtatgtggacggcgtggaggtgcacaacgccaagaccaagccccgggaggaacagtacaacagcacctaccgggtggtgtccgtgctgaccgtgctgcaccaggactggctgaacggcaaagaatacaagtgcaaggtgtccaacaaggccctgcctgcccccatcgagaaaaccatcagcaaggccaagggccagcccagagaaccccaggtgtacaccctgccccctagcagggaagagctgaccaagaaccaggtgtccctgacctgtctggtcaagggcttctaccccagcgatatcgccgtggagtgggagagcaacggccagcctgagaacaactacaagaccaccccccctgtgctggacagcgacggcagcttcttcctgtacagcaagctgaccgtggacaagagccggtggcagcagggcaacgtgtttagctgcagcgtgatgcacgaggccctgcacaaccactacacccagaagagcttaagcctgtcccctggcagt

SEQ ID NO: 1895 - DNA, 1419 bp, synthetic construct
  source 1..1419: mol_type = other DNA
agggttcagcccaccgaatcaatagtacggttcccaaatatcactaatctttgccccttcggggaagtatttaacgctactcgatttgctagcgtatatgcctggaaccggaagagaataagcaactgtgttgcagactatagcgtgctttacaattccgcatcctttagtaccttcaaatgttacggtgtgagccccaccaaactcaatgatctctgtttcacaaacgtgtacgcagatagtttcgttatacgcggggacgaagtacggcagatagcccctggccagacaggaaagatagccgattacaactacaaacttccagacgattttacagggtgtgtgatcgcttggaattcaaataacctggactccaaagtgggaggcaactataattacctgtaccgactgttccgcaaaagcaacttgaaacctttcgagcgagatatatcaaccgaaatctaccaagctggttctacaccttgtaatggtgtggagggatttaactgctacttccctcttcagtcctatggatttcagcctacaaatggagtcgggtatcaaccctatagagtcgtggtgttgtcatttgaacttctccatgcacctgctactgtctgtggtccaaaaaagtccactaatcttgtaaaaaacaaatgcgtgaacttcaatttcaatggcctcaccggaacaggtgttggatccggcggcggcggtgacggtggtggcggctccggagacaagacccacacctgccccccttgtcctgcccctgagctgctgggcggaccctccgtgtttctgttcccccccaagcccaaggacaccctgatgatcagccggacccccgaggtcacctgcgtggtggtggacgtcagccacgaggacccagaggtcaagttcaattggtatgtggacggcgtggaggtgcacaacgccaagaccaagccccgggaggaacagtacaacagcacctaccgggtggtgtccgtgctgaccgtgctgcaccaggactggctgaacggcaaagaatacaagtgcaaggtgtccaacaaggccctgcctgcccccatcgagaaaaccatcagcaaggccaagggccagcccagagaaccccaggtgtacaccctgccccctagcagggaagagctgaccaagaaccaggtgtccctgacctgtctggtcaagggcttctaccccagcgatatcgccgtggagtgggagagcaacggccagcctgagaacaactacaagaccaccccccctgtgctggacagcgacggcagcttcttcctgtacagcaagctgaccgtggacaagagccggtggcagcagggcaacgtgtttagctgcagcgtgatgcacgaggccctgcacaaccactacacccagaagagcttaagcctgtcccctggcagt

SEQ ID NO: 1896 - DNA, 1416 bp, synthetic construct
  source 1..1416: mol_type = other DNA
agggttcagcccaccgaatcaatagtacggttcccaaatatcactaatctttgccccttcggggaagtatttaacgctactcgatttgctagcgtatatgcctggaaccggaagagaataagcaactgtgttgcagactatagcgtgctttacaattccgcatcctttagtaccttcaaatgttacggtgtgagccccaccaaactcaatgatctctgtttcacaaacgtgtacgcagatagtttcgttatacgcggggacgaagtacggcagatagcccctggccagacaggaaagatagccgattacaactacaaacttccagacgattttacagggtgtgtgatcgcttggaattcaaataacctggactccaaagtgggaggcaactataattacctgtaccgactgttccgcaaaagcaacttgaaacctttcgagcgagatatatcaaccgaaatctaccaagctggttctacaccttgtaatggtgtggagggatttaactgctacttccctcttcagtcctatggatttcagcctacaaatggagtcgggtatcaaccctatagagtcgtggtgttgtcatttgaacttctccatgcacctgctactgtctgtggtccaaaaaagtccactaatcttgtaaaaaacaaatgcgtgaacttcaatttcaatggcctcaccggaacaggtggatccggcggcggcggtgacggtggtggcggctccggagacaagacccacacctgccccccttgtcctgcccctgagctgctgggcggaccctccgtgtttctgttcccccccaagcccaaggacaccctgatgatcagccggacccccgaggtcacctgcgtggtggtggacgtcagccacgaggacccagaggtcaagttcaattggtatgtggacggcgtggaggtgcacaacgccaagaccaagccccgggaggaacagtacaacagcacctaccgggtggtgtccgtgctgaccgtgctgcaccaggactggctgaacggcaaagaatacaagtgcaaggtgtccaacaaggccctgcctgcccccatcgagaaaaccatcagcaaggccaagggccagcccagagaaccccaggtgtacaccctgccccctagcagggaagagctgaccaagaaccaggtgtccctgacctgtctggtcaagggcttctaccccagcgatatcgccgtggagtgggagagcaacggccagcctgagaacaactacaagaccaccccccctgtgctggacagcgacggcagcttcttcctgtacagcaagctgaccgtggacaagagccggtggcagcagggcaacgtgtttagctgcagcgtgatgcacgaggccctgcacaaccactacacccagaagagcttaagcctgtcccctggcagt

SEQ ID NO: 1897 - DNA, 1413 bp, synthetic construct
  source 1..1413: mol_type = other DNA
agggttcagcccaccgaatcaatagtacggttcccaaatatcactaatctttgccccttcggggaagtatttaacgctactcgatttgctagcgtatatgcctggaaccggaagagaataagcaactgtgttgcagactatagcgtgctttacaattccgcatcctttagtaccttcaaatgttacggtgtgagccccaccaaactcaatgatctctgtttcacaaacgtgtacgcagatagtttcgttatacgcggggacgaagtacggcagatagcccctggccagacaggaaagatagccgattacaactacaaacttccagacgattttacagggtgtgtgatcgcttggaattcaaataacctggactccaaagtgggaggcaactataattacctgtaccgactgttccgcaaaagcaacttgaaacctttcgagcgagatatatcaaccgaaatctaccaagctggttctacaccttgtaatggtgtggagggatttaactgctacttccctcttcagtcctatggatttcagcctacaaatggagtcgggtatcaaccctatagagtcgtggtgttgtcatttgaacttctccatgcacctgctactgtctgtggtccaaaaaagtccactaatcttgtaaaaaacaaatgcgtgaacttcaatttcaatggcctcaccggaacaggatccggcggcggcggtgacggtggtggcggctccggagacaagacccacacctgccccccttgtcctgcccctgagctgctgggcggaccctccgtgtttctgttcccccccaagcccaaggacaccctgatgatcagccggacccccgaggtcacctgcgtggtggtggacgtcagccacgaggacccagaggtcaagttcaattggtatgtggacggcgtggaggtgcacaacgccaagaccaagccccgggaggaacagtacaacagcacctaccgggtggtgtccgtgctgaccgtgctgcaccaggactggctgaacggcaaagaatacaagtgcaaggtgtccaacaaggccctgcctgcccccatcgagaaaaccatcagcaaggccaagggccagcccagagaaccccaggtgtacaccctgccccctagcagggaagagctgaccaagaaccaggtgtccctgacctgtctggtcaagggcttctaccccagcgatatcgccgtggagtgggagagcaacggccagcctgagaacaactacaagaccaccccccctgtgctggacagcgacggcagcttcttcctgtacagcaagctgaccgtggacaagagccggtggcagcagggcaacgtgtttagctgcagcgtgatgcacgaggccctgcacaaccactacacccagaagagcttaagcctgtcccctggcagt

SEQ ID NO: 1898 - DNA, 1410 bp, synthetic construct
  source 1..1410: mol_type = other DNA
agggttcagcccaccgaatcaatagtacggttcccaaatatcactaatctttgccccttcggggaagtatttaacgctactcgatttgctagcgtatatgcctggaaccggaagagaataagcaactgtgttgcagactatagcgtgctttacaattccgcatcctttagtaccttcaaatgttacggtgtgagccccaccaaactcaatgatctctgtttcacaaacgtgtacgcagatagtttcgttatacgcggggacgaagtacggcagatagcccctggccagacaggaaagatagccgattacaactacaaacttccagacgattttacagggtgtgtgatcgcttggaattcaaataacctggactccaaagtgggaggcaactataattacctgtaccgactgttccgcaaaagcaacttgaaacctttcgagcgagatatatcaaccgaaatctaccaagctggttctacaccttgtaatggtgtggagggatttaactgctacttccctcttcagtcctatggatttcagcctacaaatggagtcgggtatcaaccctatagagtcgtggtgttgtcatttgaacttctccatgcacctgctactgtctgtggtccaaaaaagtccactaatcttgtaaaaaacaaatgcgtgaacttcaatttcaatggcctcaccggaggatccggcggcggcggtgacggtggtggcggctccggagacaagacccacacctgccccccttgtcctgcccctgagctgctgggcggaccctccgtgtttctgttcccccccaagcccaaggacaccctgatgatcagccggacccccgaggtcacctgcgtggtggtggacgtcagccacgaggacccagaggtcaagttcaattggtatgtggacggcgtggaggtgcacaacgccaagaccaagccccgggaggaacagtacaacagcacctaccgggtggtgtccgtgctgaccgtgctgcaccaggactggctgaacggcaaagaatacaagtgcaaggtgtccaacaaggccctgcctgcccccatcgagaaaaccatcagcaaggccaagggccagcccagagaaccccaggtgtacaccctgccccctagcagggaagagctgaccaagaaccaggtgtccctgacctgtctggtcaagggcttctaccccagcgatatcgccgtggagtgggagagcaacggccagcctgagaacaactacaagaccaccccccctgtgctggacagcgacggcagcttcttcctgtacagcaagctgaccgtggacaagagccggtggcagcagggcaacgtgtttagctgcagcgtgatgcacgaggccctgcacaaccactacacccagaagagcttaagcctgtcccctggcagt

SEQ ID NO: 1899 - DNA, 1407 bp, synthetic construct
  source 1..1407: mol_type = other DNA
agggttcagcccaccgaatcaatagtacggttcccaaatatcactaatctttgccccttcggggaagtatttaacgctactcgatttgctagcgtatatgcctggaaccggaagagaataagcaactgtgttgcagactatagcgtgctttacaattccgcatcctttagtaccttcaaatgttacggtgtgagccccaccaaactcaatgatctctgtttcacaaacgtgtacgcagatagtttcgttatacgcggggacgaagtacggcagatagcccctggccagacaggaaagatagccgattacaactacaaacttccagacgattttacagggtgtgtgatcgcttggaattcaaataacctggactccaaagtgggaggcaactataattacctgtaccgactgttccgcaaaagcaacttgaaacctttcgagcgagatatatcaaccgaaatctaccaagctggttctacaccttgtaatggtgtggagggatttaactgctacttccctcttcagtcctatggatttcagcctacaaatggagtcgggtatcaaccctatagagtcgtggtgttgtcatttgaacttctccatgcacctgctactgtctgtggtccaaaaaagtccactaatcttgtaaaaaacaaatgcgtgaacttcaatttcaatggcctcaccggatccggcggcggcggtgacggtggtggcggctccggagacaagacccacacctgccccccttgtcctgcccctgagctgctgggcggaccctccgtgtttctgttcccccccaagcccaaggacaccctgatgatcagccggacccccgaggtcacctgcgtggtggtggacgtcagccacgaggacccagaggtcaagttcaattggtatgtggacggcgtggaggtgcacaacgccaagaccaagccccgggaggaacagtacaacagcacctaccgggtggtgtccgtgctgaccgtgctgcaccaggactggctgaacggcaaagaatacaagtgcaaggtgtccaacaaggccctgcctgcccccatcgagaaaaccatcagcaaggccaagggccagcccagagaaccccaggtgtacaccctgccccctagcagggaagagctgaccaagaaccaggtgtccctgacctgtctggtcaagggcttctaccccagcgatatcgccgtggagtgggagagcaacggccagcctgagaacaactacaagaccaccccccctgtgctggacagcgacggcagcttcttcctgtacagcaagctgaccgtggacaagagccggtggcagcagggcaacgtgtttagctgcagcgtgatgcacgaggccctgcacaaccactacacccagaagagcttaagcctgtcccctggcagt

SEQ ID NO: 1900 - DNA, 1404 bp, synthetic construct
  source 1..1404: mol_type = other DNA
agggttcagcccaccgaatcaatagtacggttcccaaatatcactaatctttgccccttcggggaagtatttaacgctactcgatttgctagcgtatatgcctggaaccggaagagaataagcaactgtgttgcagactatagcgtgctttacaattccgcatcctttagtaccttcaaatgttacggtgtgagccccaccaaactcaatgatctctgtttcacaaacgtgtacgcagatagtttcgttatacgcggggacgaagtacggcagatagcccctggccagacaggaaagatagccgattacaactacaaacttccagacgattttacagggtgtgtgatcgcttggaattcaaataacctggactccaaagtgggaggcaactataattacctgtaccgactgttccgcaaaagcaacttgaaacctttcgagcgagatatatcaaccgaaatctaccaagctggttctacaccttgtaatggtgtggagggatttaactgctacttccctcttcagtcctatggatttcagcctacaaatggagtcgggtatcaaccctatagagtcgtggtgttgtcatttgaacttctccatgcacctgctactgtctgtggtccaaaaaagtccactaatcttgtaaaaaacaaatgcgtgaacttcaatttcaatggcctcggatccggcggcggcggtgacggtggtggcggctccggagacaagacccacacctgccccccttgtcctgcccctgagctgctgggcggaccctccgtgtttctgttcccccccaagcccaaggacaccctgatgatcagccggacccccgaggtcacctgcgtggtggtggacgtcagccacgaggacccagaggtcaagttcaattggtatgtggacggcgtggaggtgcacaacgccaagaccaagccccgggaggaacagtacaacagcacctaccgggtggtgtccgtgctgaccgtgctgcaccaggactggctgaacggcaaagaatacaagtgcaaggtgtccaacaaggccctgcctgcccccatcgagaaaaccatcagcaaggccaagggccagcccagagaaccccaggtgtacaccctgccccctagcagggaagagctgaccaagaaccaggtgtccctgacctgtctggtcaagggcttctaccccagcgatatcgccgtggagtgggagagcaacggccagcctgagaacaactacaagaccaccccccctgtgctggacagcgacggcagcttcttcctgtacagcaagctgaccgtggacaagagccggtggcagcagggcaacgtgtttagctgcagcgtgatgcacgaggccctgcacaaccactacacccagaagagcttaagcctgtcccctggcagt

SEQ ID NO: 1901 - DNA, 1401 bp, synthetic construct
  source 1..1401: mol_type = other DNA
agggttcagcccaccgaatcaatagtacggttcccaaatatcactaatctttgccccttcggggaagtatttaacgctactcgatttgctagcgtatatgcctggaaccggaagagaataagcaactgtgttgcagactatagcgtgctttacaattccgcatcctttagtaccttcaaatgttacggtgtgagccccaccaaactcaatgatctctgtttcacaaacgtgtacgcagatagtttcgttatacgcggggacgaagtacggcagatagcccctggccagacaggaaagatagccgattacaactacaaacttccagacgattttacagggtgtgtgatcgcttggaattcaaataacctggactccaaagtgggaggcaactataattacctgtaccgactgttccgcaaaagcaacttgaaacctttcgagcgagatatatcaaccgaaatctaccaagctggttctacaccttgtaatggtgtggagggatttaactgctacttccctcttcagtcctatggatttcagcctacaaatggagtcgggtatcaaccctatagagtcgtggtgttgtcatttgaacttctccatgcacctgctactgtctgtggtccaaaaaagtccactaatcttgtaaaaaacaaatgcgtgaacttcaatttcaatggcggatccggcggcggcggtgacggtggtggcggctccggagacaagacccacacctgccccccttgtcctgcccctgagctgctgggcggaccctccgtgtttctgttcccccccaagcccaaggacaccctgatgatcagccggacccccgaggtcacctgcgtggtggtggacgtcagccacgaggacccagaggtcaagttcaattggtatgtggacggcgtggaggtgcacaacgccaagaccaagccccgggaggaacagtacaacagcacctaccgggtggtgtccgtgctgaccgtgctgcaccaggactggctgaacggcaaagaatacaagtgcaaggtgtccaacaaggccctgcctgcccccatcgagaaaaccatcagcaaggccaagggccagcccagagaaccccaggtgtacaccctgccccctagcagggaagagctgaccaagaaccaggtgtccctgacctgtctggtcaagggcttctaccccagcgatatcgccgtggagtgggagagcaacggccagcctgagaacaactacaagaccaccccccctgtgctggacagcgacggcagcttcttcctgtacagcaagctgaccgtggacaagagccggtggcagcagggcaacgtgtttagctgcagcgtgatgcacgaggccctgcacaaccactacacccagaagagcttaagcctgtcccctggcagt

SEQ ID NO: 1902 - DNA, 1398 bp, synthetic construct
  source 1..1398: mol_type = other DNA
agggttcagcccaccgaatcaatagtacggttcccaaatatcactaatctttgccccttcggggaagtatttaacgctactcgatttgctagcgtatatgcctggaaccggaagagaataagcaactgtgttgcagactatagcgtgctttacaattccgcatcctttagtaccttcaaatgttacggtgtgagccccaccaaactcaatgatctctgtttcacaaacgtgtacgcagatagtttcgttatacgcggggacgaagtacggcagatagcccctggccagacaggaaagatagccgattacaactacaaacttccagacgattttacagggtgtgtgatcgcttggaattcaaataacctggactccaaagtgggaggcaactataattacctgtaccgactgttccgcaaaagcaacttgaaacctttcgagcgagatatatcaaccgaaatctaccaagctggttctacaccttgtaatggtgtggagggatttaactgctacttccctcttcagtcctatggatttcagcctacaaatggagtcgggtatcaaccctatagagtcgtggtgttgtcatttgaacttctccatgcacctgctactgtctgtggtccaaaaaagtccactaatcttgtaaaaaacaaatgcgtgaacttcaatttcaatggatccggcggcggcggtgacggtggtggcggctccggagacaagacccacacctgccccccttgtcctgcccctgagctgctgggcggaccctccgtgtttctgttcccccccaagcccaaggacaccctgatgatcagccggacccccgaggtcacctgcgtggtggtggacgtcagccacgaggacccagaggtcaagttcaattggtatgtggacggcgtggaggtgcacaacgccaagaccaagccccgggaggaacagtacaacagcacctaccgggtggtgtccgtgctgaccgtgctgcaccaggactggctgaacggcaaagaatacaagtgcaaggtgtccaacaaggccctgcctgcccccatcgagaaaaccatcagcaaggccaagggccagcccagagaaccccaggtgtacaccctgccccctagcagggaagagctgaccaagaaccaggtgtccctgacctgtctggtcaagggcttctaccccagcgatatcgccgtggagtgggagagcaacggccagcctgagaacaactacaagaccaccccccctgtgctggacagcgacggcagcttcttcctgtacagcaagctgaccgtggacaagagccggtggcagcagggcaacgtgtttagctgcagcgtgatgcacgaggccctgcacaaccactacacccagaagagcttaagcctgtcccctggcagt

SEQ ID NO: 1903 - DNA, 1395 bp, synthetic construct
  source 1..1395: mol_type = other DNA
agggttcagcccaccgaatcaatagtacggttcccaaatatcactaatctttgccccttcggggaagtatttaacgctactcgatttgctagcgtatatgcctggaaccggaagagaataagcaactgtgttgcagactatagcgtgctttacaattccgcatcctttagtaccttcaaatgttacggtgtgagccccaccaaactcaatgatctctgtttcacaaacgtgtacgcagatagtttcgttatacgcggggacgaagtacggcagatagcccctggccagacaggaaagatagccgattacaactacaaacttccagacgattttacagggtgtgtgatcgcttggaattcaaataacctggactccaaagtgggaggcaactataattacctgtaccgactgttccgcaaaagcaacttgaaacctttcgagcgagatatatcaaccgaaatctaccaagctggttctacaccttgtaatggtgtggagggatttaactgctacttccctcttcagtcctatggatttcagcctacaaatggagtcgggtatcaaccctatagagtcgtggtgttgtcatttgaacttctccatgcacctgctactgtctgtggtccaaaaaagtccactaatcttgtaaaaaacaaatgcgtgaacttcaatttcggatccggcggcggcggtgacggtggtggcggctccggagacaagacccacacctgccccccttgtcctgcccctgagctgctgggcggaccctccgtgtttctgttcccccccaagcccaaggacaccctgatgatcagccggacccccgaggtcacctgcgtggtggtggacgtcagccacgaggacccagaggtcaagttcaattggtatgtggacggcgtggaggtgcacaacgccaagaccaagccccgggaggaacagtacaacagcacctaccgggtggtgtccgtgctgaccgtgctgcaccaggactggctgaacggcaaagaatacaagtgcaaggtgtccaacaaggccctgcctgcccccatcgagaaaaccatcagcaaggccaagggccagcccagagaaccccaggtgtacaccctgccccctagcagggaagagctgaccaagaaccaggtgtccctgacctgtctggtcaagggcttctaccccagcgatatcgccgtggagtgggagagcaacggccagcctgagaacaactacaagaccaccccccctgtgctggacagcgacggcagcttcttcctgtacagcaagctgaccgtggacaagagccggtggcagcagggcaacgtgtttagctgcagcgtgatgcacgaggccctgcacaaccactacacccagaagagcttaagcctgtcccctggcagt

SEQ ID NO: 1904 - DNA, 1392 bp, synthetic construct
  source 1..1392: mol_type = other DNA
agggttcagcccaccgaatcaatagtacggttcccaaatatcactaatctttgccccttcggggaagtatttaacgctactcgatttgctagcgtatatgcctggaaccggaagagaataagcaactgtgttgcagactatagcgtgctttacaattccgcatcctttagtaccttcaaatgttacggtgtgagccccaccaaactcaatgatctctgtttcacaaacgtgtacgcagatagtttcgttatacgcggggacgaagtacggcagatagcccctggccagacaggaaagatagccgattacaactacaaacttccagacgattttacagggtgtgtgatcgcttggaattcaaataacctggactccaaagtgggaggcaactataattacctgtaccgactgttccgcaaaagcaacttgaaacctttcgagcgagatatatcaaccgaaatctaccaagctggttctacaccttgtaatggtgtggagggatttaactgctacttccctcttcagtcctatggatttcagcctacaaatggagtcgggtatcaaccctatagagtcgtggtgttgtcatttgaacttctccatgcacctgctactgtctgtggtccaaaaaagtccactaatcttgtaaaaaacaaatgcgtgaacttcaatggatccggcggcggcggtgacggtggtggcggctccggagacaagacccacacctgccccccttgtcctgcccctgagctgctgggcggaccctccgtgtttctgttcccccccaagcccaaggacaccctgatgatcagccggacccccgaggtcacctgcgtggtggtggacgtcagccacgaggacccagaggtcaagttcaattggtatgtggacggcgtggaggtgcacaacgccaagaccaagccccgggaggaacagtacaacagcacctaccgggtggtgtccgtgctgaccgtgctgcaccaggactggctgaacggcaaagaatacaagtgcaaggtgtccaacaaggccctgcctgcccccatcgagaaaaccatcagcaaggccaagggccagcccagagaaccccaggtgtacaccctgccccctagcagggaagagctgaccaagaaccaggtgtccctgacctgtctggtcaagggcttctaccccagcgatatcgccgtggagtgggagagcaacggccagcctgagaacaactacaagaccaccccccctgtgctggacagcgacggcagcttcttcctgtacagcaagctgaccgtggacaagagccggtggcagcagggcaacgtgtttagctgcagcgtgatgcacgaggccctgcacaaccactacacccagaagagcttaagcctgtcccctggcagt

SEQ ID NO: 1905 - DNA, 1389 bp, synthetic construct
  source 1..1389: mol_type = other DNA
agggttcagcccaccgaatcaatagtacggttcccaaatatcactaatctttgccccttcggggaagtatttaacgctactcgatttgctagcgtatatgcctggaaccggaagagaataagcaactgtgttgcagactatagcgtgctttacaattccgcatcctttagtaccttcaaatgttacggtgtgagccccaccaaactcaatgatctctgtttcacaaacgtgtacgcagatagtttcgttatacgcggggacgaagtacggcagatagcccctggccagacaggaaagatagccgattacaactacaaacttccagacgattttacagggtgtgtgatcgcttggaattcaaataacctggactccaaagtgggaggcaactataattacctgtaccgactgttccgcaaaagcaacttgaaacctttcgagcgagatatatcaaccgaaatctaccaagctggttctacaccttgtaatggtgtggagggatttaactgctacttccctcttcagtcctatggatttcagcctacaaatggagtcgggtatcaaccctatagagtcgtggtgttgtcatttgaacttctccatgcacctgctactgtctgtggtccaaaaaagtccactaatcttgtaaaaaacaaatgcgtgaacttcggatccggcggcggcggtgacggtggtggcggctccggagacaagacccacacctgccccccttgtcctgcccctgagctgctgggcggaccctccgtgtttctgttcccccccaagcccaaggacaccctgatgatcagccggacccccgaggtcacctgcgtggtggtggacgtcagccacgaggacccagaggtcaagttcaattggtatgtggacggcgtggaggtgcacaacgccaagaccaagccccgggaggaacagtacaacagcacctaccgggtggtgtccgtgctgaccgtgctgcaccaggactggctgaacggcaaagaatacaagtgcaaggtgtccaacaaggccctgcctgcccccatcgagaaaaccatcagcaaggccaagggccagcccagagaaccccaggtgtacaccctgccccctagcagggaagagctgaccaagaaccaggtgtccctgacctgtctggtcaagggcttctaccccagcgatatcgccgtggagtgggagagcaacggccagcctgagaacaactacaagaccaccccccctgtgctggacagcgacggcagcttcttcctgtacagcaagctgaccgtggacaagagccggtggcagcagggcaacgtgtttagctgcagcgtgatgcacgaggccctgcacaaccactacacccagaagagcttaagcctgtcccctggcagt

SEQ ID NO: 1906 - DNA, 1386 bp, synthetic construct
  source 1..1386: mol_type = other DNA
agggttcagcccaccgaatcaatagtacggttcccaaatatcactaatctttgccccttcggggaagtatttaacgctactcgatttgctagcgtatatgcctggaaccggaagagaataagcaactgtgttgcagactatagcgtgctttacaattccgcatcctttagtaccttcaaatgttacggtgtgagccccaccaaactcaatgatctctgtttcacaaacgtgtacgcagatagtttcgttatacgcggggacgaagtacggcagatagcccctggccagacaggaaagatagccgattacaactacaaacttccagacgattttacagggtgtgtgatcgcttggaattcaaataacctggactccaaagtgggaggcaactataattacctgtaccgactgttccgcaaaagcaacttgaaacctttcgagcgagatatatcaaccgaaatctaccaagctggttctacaccttgtaatggtgtggagggatttaactgctacttccctcttcagtcctatggatttcagcctacaaatggagtcgggtatcaaccctatagagtcgtggtgttgtcatttgaacttctccatgcacctgctactgtctgtggtccaaaaaagtccactaatcttgtaaaaaacaaatgcgtgaacggatccggcggcggcggtgacggtggtggcggctccggagacaagacccacacctgccccccttgtcctgcccctgagctgctgggcggaccctccgtgtttctgttcccccccaagcccaaggacaccctgatgatcagccggacccccgaggtcacctgcgtggtggtggacgtcagccacgaggacccagaggtcaagttcaattggtatgtggacggcgtggaggtgcacaacgccaagaccaagccccgggaggaacagtacaacagcacctaccgggtggtgtccgtgctgaccgtgctgcaccaggactggctgaacggcaaagaatacaagtgcaaggtgtccaacaaggccctgcctgcccccatcgagaaaaccatcagcaaggccaagggccagcccagagaaccccaggtgtacaccctgccccctagcagggaagagctgaccaagaaccaggtgtccctgacctgtctggtcaagggcttctaccccagcgatatcgccgtggagtgggagagcaacggccagcctgagaacaactacaagaccaccccccctgtgctggacagcgacggcagcttcttcctgtacagcaagctgaccgtggacaagagccggtggcagcagggcaacgtgtttagctgcagcgtgatgcacgaggccctgcacaaccactacacccagaagagcttaagcctgtcccctggcagt

SEQ ID NO: 1907 - DNA, 1383 bp, synthetic construct
  source 1..1383: mol_type = other DNA
agggttcagcccaccgaatcaatagtacggttcccaaatatcactaatctttgccccttcggggaagtatttaacgctactcgatttgctagcgtatatgcctggaaccggaagagaataagcaactgtgttgcagactatagcgtgctttacaattccgcatcctttagtaccttcaaatgttacggtgtgagccccaccaaactcaatgatctctgtttcacaaacgtgtacgcagatagtttcgttatacgcggggacgaagtacggcagatagcccctggccagacaggaaagatagccgattacaactacaaacttccagacgattttacagggtgtgtgatcgcttggaattcaaataacctggactccaaagtgggaggcaactataattacctgtaccgactgttccgcaaaagcaacttgaaacctttcgagcgagatatatcaaccgaaatctaccaagctggttctacaccttgtaatggtgtggagggatttaactgctacttccctcttcagtcctatggatttcagcctacaaatggagtcgggtatcaaccctatagagtcgtggtgttgtcatttgaacttctccatgcacctgctactgtctgtggtccaaaaaagtccactaatcttgtaaaaaacaaatgcgtgggatccggcggcggcggtgacggtggtggcggctccggagacaagacccacacctgccccccttgtcctgcccctgagctgctgggcggaccctccgtgtttctgttcccccccaagcccaaggacaccctgatgatcagccggacccccgaggtcacctgcgtggtggtggacgtcagccacgaggacccagaggtcaagttcaattggtatgtggacggcgtggaggtgcacaacgccaagaccaagccccgggaggaacagtacaacagcacctaccgggtggtgtccgtgctgaccgtgctgcaccaggactggctgaacggcaaagaatacaagtgcaaggtgtccaacaaggccctgcctgcccccatcgagaaaaccatcagcaaggccaagggccagcccagagaaccccaggtgtacaccctgccccctagcagggaagagctgaccaagaaccaggtgtccctgacctgtctggtcaagggcttctaccccagcgatatcgccgtggagtgggagagcaacggccagcctgagaacaactacaagaccaccccccctgtgctggacagcgacggcagcttcttcctgtacagcaagctgaccgtggacaagagccggtggcagcagggcaacgtgtttagctgcagcgtgatgcacgaggccctgcacaaccactacacccagaagagcttaagcctgtcccctggcagt

SEQ ID NO: 1908 - DNA, 1380 bp, synthetic construct
  source 1..1380: mol_type = other DNA
agggttcagcccaccgaatcaatagtacggttcccaaatatcactaatctttgccccttcggggaagtatttaacgctactcgatttgctagcgtatatgcctggaaccggaagagaataagcaactgtgttgcagactatagcgtgctttacaattccgcatcctttagtaccttcaaatgttacggtgtgagccccaccaaactcaatgatctctgtttcacaaacgtgtacgcagatagtttcgttatacgcggggacgaagtacggcagatagcccctggccagacaggaaagatagccgattacaactacaaacttccagacgattttacagggtgtgtgatcgcttggaattcaaataacctggactccaaagtgggaggcaactataattacctgtaccgactgttccgcaaaagcaacttgaaacctttcgagcgagatatatcaaccgaaatctaccaagctggttctacaccttgtaatggtgtggagggatttaactgctacttccctcttcagtcctatggatttcagcctacaaatggagtcgggtatcaaccctatagagtcgtggtgttgtcatttgaacttctccatgcacctgctactgtctgtggtccaaaaaagtccactaatcttgtaaaaaacaaatgcggatccggcggcggcggtgacggtggtggcggctccggagacaagacccacacctgccccccttgtcctgcccctgagctgctgggcggaccctccgtgtttctgttcccccccaagcccaaggacaccctgatgatcagccggacccccgaggtcacctgcgtggtggtggacgtcagccacgaggacccagaggtcaagttcaattggtatgtggacggcgtggaggtgcacaacgccaagaccaagccccgggaggaacagtacaacagcacctaccgggtggtgtccgtgctgaccgtgctgcaccaggactggctgaacggcaaagaatacaagtgcaaggtgtccaacaaggccctgcctgcccccatcgagaaaaccatcagcaaggccaagggccagcccagagaaccccaggtgtacaccctgccccctagcagggaagagctgaccaagaaccaggtgtccctgacctgtctggtcaagggcttctaccccagcgatatcgccgtggagtgggagagcaacggccagcctgagaacaactacaagaccaccccccctgtgctggacagcgacggcagcttcttcctgtacagcaagctgaccgtggacaagagccggtggcagcagggcaacgtgtttagctgcagcgtgatgcacgaggccctgcacaaccactacacccagaagagcttaagcctgtcccctggcagt

SEQ ID NO: 1909 - DNA, 1377 bp, synthetic construct
  source 1..1377: mol_type = other DNA
agggttcagcccaccgaatcaatagtacggttcccaaatatcactaatctttgccccttcggggaagtatttaacgctactcgatttgctagcgtatatgcctggaaccggaagagaataagcaactgtgttgcagactatagcgtgctttacaattccgcatcctttagtaccttcaaatgttacggtgtgagccccaccaaactcaatgatctctgtttcacaaacgtgtacgcagatagtttcgttatacgcggggacgaagtacggcagatagcccctggccagacaggaaagatagccgattacaactacaaacttccagacgattttacagggtgtgtgatcgcttggaattcaaataacctggactccaaagtgggaggcaactataattacctgtaccgactgttccgcaaaagcaacttgaaacctttcgagcgagatatatcaaccgaaatctaccaagctggttctacaccttgtaatggtgtggagggatttaactgctacttccctcttcagtcctatggatttcagcctacaaatggagtcgggtatcaaccctatagagtcgtggtgttgtcatttgaacttctccatgcacctgctactgtctgtggtccaaaaaagtccactaatcttgtaaaaaacaaaggatccggcggcggcggtgacggtggtggcggctccggagacaagacccacacctgccccccttgtcctgcccctgagctgctgggcggaccctccgtgtttctgttcccccccaagcccaaggacaccctgatgatcagccggacccccgaggtcacctgcgtggtggtggacgtcagccacgaggacccagaggtcaagttcaattggtatgtggacggcgtggaggtgcacaacgccaagaccaagccccgggaggaacagtacaacagcacctaccgggtggtgtccgtgctgaccgtgctgcaccaggactggctgaacggcaaagaatacaagtgcaaggtgtccaacaaggccctgcctgcccccatcgagaaaaccatcagcaaggccaagggccagcccagagaaccccaggtgtacaccctgccccctagcagggaagagctgaccaagaaccaggtgtccctgacctgtctggtcaagggcttctaccccagcgatatcgccgtggagtgggagagcaacggccagcctgagaacaactacaagaccaccccccctgtgctggacagcgacggcagcttcttcctgtacagcaagctgaccgtggacaagagccggtggcagcagggcaacgtgtttagctgcagcgtgatgcacgaggccctgcacaaccactacacccagaagagcttaagcctgtcccctggcagt

SEQ ID NO: 1910 - DNA, 1374 bp, synthetic construct
  source 1..1374: mol_type = other DNA
agggttcagcccaccgaatcaatagtacggttcccaaatatcactaatctttgccccttcggggaagtatttaacgctactcgatttgctagcgtatatgcctggaaccggaagagaataagcaactgtgttgcagactatagcgtgctttacaattccgcatcctttagtaccttcaaatgttacggtgtgagccccaccaaactcaatgatctctgtttcacaaacgtgtacgcagatagtttcgttatacgcggggacgaagtacggcagatagcccctggccagacaggaaagatagccgattacaactacaaacttccagacgattttacagggtgtgtgatcgcttggaattcaaataacctggactccaaagtgggaggcaactataattacctgtaccgactgttccgcaaaagcaacttgaaacctttcgagcgagatatatcaaccgaaatctaccaagctggttctacaccttgtaatggtgtggagggatttaactgctacttccctcttcagtcctatggatttcagcctacaaatggagtcgggtatcaaccctatagagtcgtggtgttgtcatttgaacttctccatgcacctgctactgtctgtggtccaaaaaagtccactaatcttgtaaaaaacggatccggcggcggcggtgacggtggtggcggctccggagacaagacccacacctgccccccttgtcctgcccctgagctgctgggcggaccctccgtgtttctgttcccccccaagcccaaggacaccctgatgatcagccggacccccgaggtcacctgcgtggtggtggacgtcagccacgaggacccagaggtcaagttcaattggtatgtggacggcgtggaggtgcacaacgccaagaccaagccccgggaggaacagtacaacagcacctaccgggtggtgtccgtgctgaccgtgctgcaccaggactggctgaacggcaaagaatacaagtgcaaggtgtccaacaaggccctgcctgcccccatcgagaaaaccatcagcaaggccaagggccagcccagagaaccccaggtgtacaccctgccccctagcagggaagagctgaccaagaaccaggtgtccctgacctgtctggtcaagggcttctaccccagcgatatcgccgtggagtgggagagcaacggccagcctgagaacaactacaagaccaccccccctgtgctggacagcgacggcagcttcttcctgtacagcaagctgaccgtggacaagagccggtggcagcagggcaacgtgtttagctgcagcgtgatgcacgaggccctgcacaaccactacacccagaagagcttaagcctgtcccctggcagt

SEQ ID NO: 1911 - DNA, 1371 bp, synthetic construct
  source 1..1371: mol_type = other DNA
agggttcagcccaccgaatcaatagtacggttcccaaatatcactaatctttgccccttcggggaagtatttaacgctactcgatttgctagcgtatatgcctggaaccggaagagaataagcaactgtgttgcagactatagcgtgctttacaattccgcatcctttagtaccttcaaatgttacggtgtgagccccaccaaactcaatgatctctgtttcacaaacgtgtacgcagatagtttcgttatacgcggggacgaagtacggcagatagcccctggccagacaggaaagatagccgattacaactacaaacttccagacgattttacagggtgtgtgatcgcttggaattcaaataacctggactccaaagtgggaggcaactataattacctgtaccgactgttccgcaaaagcaacttgaaacctttcgagcgagatatatcaaccgaaatctaccaagctggttctacaccttgtaatggtgtggagggatttaactgctacttccctcttcagtcctatggatttcagcctacaaatggagtcgggtatcaaccctatagagtcgtggtgttgtcatttgaacttctccatgcacctgctactgtctgtggtccaaaaaagtccactaatcttgtaaaaggatccggcggcggcggtgacggtggtggcggctccggagacaagacccacacctgccccccttgtcctgcccctgagctgctgggcggaccctccgtgtttctgttcccccccaagcccaaggacaccctgatgatcagccggacccccgaggtcacctgcgtggtggtggacgtcagccacgaggacccagaggtcaagttcaattggtatgtggacggcgtggaggtgcacaacgccaagaccaagccccgggaggaacagtacaacagcacctaccgggtggtgtccgtgctgaccgtgctgcaccaggactggctgaacggcaaagaatacaagtgcaaggtgtccaacaaggccctgcctgcccccatcgagaaaaccatcagcaaggccaagggccagcccagagaaccccaggtgtacaccctgccccctagcagggaagagctgaccaagaaccaggtgtccctgacctgtctggtcaagggcttctaccccagcgatatcgccgtggagtgggagagcaacggccagcctgagaacaactacaagaccaccccccctgtgctggacagcgacggcagcttcttcctgtacagcaagctgaccgtggacaagagccggtggcagcagggcaacgtgtttagctgcagcgtgatgcacgaggccctgcacaaccactacacccagaagagcttaagcctgtcccctggcagt

SEQ ID NO: 1912 - DNA, 1368 bp, synthetic construct
  source 1..1368: mol_type = other DNA
agggttcagcccaccgaatcaatagtacggttcccaaatatcactaatctttgccccttcggggaagtatttaacgctactcgatttgctagcgtatatgcctggaaccggaagagaataagcaactgtgttgcagactatagcgtgctttacaattccgcatcctttagtaccttcaaatgttacggtgtgagccccaccaaactcaatgatctctgtttcacaaacgtgtacgcagatagtttcgttatacgcggggacgaagtacggcagatagcccctggccagacaggaaagatagccgattacaactacaaacttccagacgattttacagggtgtgtgatcgcttggaattcaaataacctggactccaaagtgggaggcaactataattacctgtaccgactgttccgcaaaagcaacttgaaacctttcgagcgagatatatcaaccgaaatctaccaagctggttctacaccttgtaatggtgtggagggatttaactgctacttccctcttcagtcctatggatttcagcctacaaatggagtcgggtatcaaccctatagagtcgtggtgttgtcatttgaacttctccatgcacctgctactgtctgtggtccaaaaaagtccactaatcttgtaggatccggcggcggcggtgacggtggtggcggctccggagacaagacccacacctgccccccttgtcctgcccctgagctgctgggcggaccctccgtgtttctgttcccccccaagcccaaggacaccctgatgatcagccggacccccgaggtcacctgcgtggtggtggacgtcagccacgaggacccagaggtcaagttcaattggtatgtggacggcgtggaggtgcacaacgccaagaccaagccccgggaggaacagtacaacagcacctaccgggtggtgtccgtgctgaccgtgctgcaccaggactggctgaacggcaaagaatacaagtgcaaggtgtccaacaaggccctgcctgcccccatcgagaaaaccatcagcaaggccaagggccagcccagagaaccccaggtgtacaccctgccccctagcagggaagagctgaccaagaaccaggtgtccctgacctgtctggtcaagggcttctaccccagcgatatcgccgtggagtgggagagcaacggccagcctgagaacaactacaagaccaccccccctgtgctggacagcgacggcagcttcttcctgtacagcaagctgaccgtggacaagagccggtggcagcagggcaacgtgtttagctgcagcgtgatgcacgaggccctgcacaaccactacacccagaagagcttaagcctgtcccctggcagt

SEQ ID NO: 1913 - DNA, 1365 bp, synthetic construct
  source 1..1365: mol_type = other DNA
agggttcagcccaccgaatcaatagtacggttcccaaatatcactaatctttgccccttcggggaagtatttaacgctactcgatttgctagcgtatatgcctggaaccggaagagaataagcaactgtgttgcagactatagcgtgctttacaattccgcatcctttagtaccttcaaatgttacggtgtgagccccaccaaactcaatgatctctgtttcacaaacgtgtacgcagatagtttcgttatacgcggggacgaagtacggcagatagcccctggccagacaggaaagatagccgattacaactacaaacttccagacgattttacagggtgtgtgatcgcttggaattcaaataacctggactccaaagtgggaggcaactataattacctgtaccgactgttccgcaaaagcaacttgaaacctttcgagcgagatatatcaaccgaaatctaccaagctggttctacaccttgtaatggtgtggagggatttaactgctacttccctcttcagtcctatggatttcagcctacaaatggagtcgggtatcaaccctatagagtcgtggtgttgtcatttgaacttctccatgcacctgctactgtctgtggtccaaaaaagtccactaatcttggatccggcggcggcggtgacggtggtggcggctccggagacaagacccacacctgccccccttgtcctgcccctgagctgctgggcggaccctccgtgtttctgttcccccccaagcccaaggacaccctgatgatcagccggacccccgaggtcacctgcgtggtggtggacgtcagccacgaggacccagaggtcaagttcaattggtatgtggacggcgtggaggtgcacaacgccaagaccaagccccgggaggaacagtacaacagcacctaccgggtggtgtccgtgctgaccgtgctgcaccaggactggctgaacggcaaagaatacaagtgcaaggtgtccaacaaggccctgcctgcccccatcgagaaaaccatcagcaaggccaagggccagcccagagaaccccaggtgtacaccctgccccctagcagggaagagctgaccaagaaccaggtgtccctgacctgtctggtcaagggcttctaccccagcgatatcgccgtggagtgggagagcaacggccagcctgagaacaactacaagaccaccccccctgtgctggacagcgacggcagcttcttcctgtacagcaagctgaccgtggacaagagccggtggcagcagggcaacgtgtttagctgcagcgtgatgcacgaggccctgcacaaccactacacccagaagagcttaagcctgtcccctggcagt

SEQ ID NO: 1914 - DNA, 1362 bp, synthetic construct
  source 1..1362: mol_type = other DNA
agggttcagcccaccgaatcaatagtacggttcccaaatatcactaatctttgccccttcggggaagtatttaacgctactcgatttgctagcgtatatgcctggaaccggaagagaataagcaactgtgttgcagactatagcgtgctttacaattccgcatcctttagtaccttcaaatgttacggtgtgagccccaccaaactcaatgatctctgtttcacaaacgtgtacgcagatagtttcgttatacgcggggacgaagtacggcagatagcccctggccagacaggaaagatagccgattacaactacaaacttccagacgattttacagggtgtgtgatcgcttggaattcaaataacctggactccaaagtgggaggcaactataattacctgtaccgactgttccgcaaaagcaacttgaaacctttcgagcgagatatatcaaccgaaatctaccaagctggttctacaccttgtaatggtgtggagggatttaactgctacttccctcttcagtcctatggatttcagcctacaaatggagtcgggtatcaaccctatagagtcgtggtgttgtcatttgaacttctccatgcacctgctactgtctgtggtccaaaaaagtccactaatggatccggcggcggcggtgacggtggtggcggctccggagacaagacccacacctgccccccttgtcctgcccctgagctgctgggcggaccctccgtgtttctgttcccccccaagcccaaggacaccctgatgatcagccggacccccgaggtcacctgcgtggtggtggacgtcagccacgaggacccagaggtcaagttcaattggtatgtggacggcgtggaggtgcacaacgccaagaccaagccccgggaggaacagtacaacagcacctaccgggtggtgtccgtgctgaccgtgctgcaccaggactggctgaacggcaaagaatacaagtgcaaggtgtccaacaaggccctgcctgcccccatcgagaaaaccatcagcaaggccaagggccagcccagagaaccccaggtgtacaccctgccccctagcagggaagagctgaccaagaaccaggtgtccctgacctgtctggtcaagggcttctaccccagcgatatcgccgtggagtgggagagcaacggccagcctgagaacaactacaagaccaccccccctgtgctggacagcgacggcagcttcttcctgtacagcaagctgaccgtggacaagagccggtggcagcagggcaacgtgtttagctgcagcgtgatgcacgaggccctgcacaaccactacacccagaagagcttaagcctgtcccctggcagt

SEQ ID NO: 1915 - DNA, 1359 bp, synthetic construct
  source 1..1359: mol_type = other DNA
agggttcagcccaccgaatcaatagtacggttcccaaatatcactaatctttgccccttcggggaagtatttaacgctactcgatttgctagcgtatatgcctggaaccggaagagaataagcaactgtgttgcagactatagcgtgctttacaattccgcatcctttagtaccttcaaatgttacggtgtgagccccaccaaactcaatgatctctgtttcacaaacgtgtacgcagatagtttcgttatacgcggggacgaagtacggcagatagcccctggccagacaggaaagatagccgattacaactacaaacttccagacgattttacagggtgtgtgatcgcttggaattcaaataacctggactccaaagtgggaggcaactataattacctgtaccgactgttccgcaaaagcaacttgaaacctttcgagcgagatatatcaaccgaaatctaccaagctggttctacaccttgtaatggtgtggagggatttaactgctacttccctcttcagtcctatggatttcagcctacaaatggagtcgggtatcaaccctatagagtcgtggtgttgtcatttgaacttctccatgcacctgctactgtctgtggtccaaaaaagtccactggatccggcggcggcggtgacggtggtggcggctccggagacaagacccacacctgccccccttgtcctgcccctgagctgctgggcggaccctccgtgtttctgttcccccccaagcccaaggacaccctgatgatcagccggacccccgaggtcacctgcgtggtggtggacgtcagccacgaggacccagaggtcaagttcaattggtatgtggacggcgtggaggtgcacaacgccaagaccaagccccgggaggaacagtacaacagcacctaccgggtggtgtccgtgctgaccgtgctgcaccaggactggctgaacggcaaagaatacaagtgcaaggtgtccaacaaggccctgcctgcccccatcgagaaaaccatcagcaaggccaagggccagcccagagaaccccaggtgtacaccctgccccctagcagggaagagctgaccaagaaccaggtgtccctgacctgtctggtcaagggcttctaccccagcgatatcgccgtggagtgggagagcaacggccagcctgagaacaactacaagaccaccccccctgtgctggacagcgacggcagcttcttcctgtacagcaagctgaccgtggacaagagccggtggcagcagggcaacgtgtttagctgcagcgtgatgcacgaggccctgcacaaccactacacccagaagagcttaagcctgtcccctggcagt

SEQ ID NO: 1916 - DNA, 1356 bp, synthetic construct
  source 1..1356: mol_type = other DNA
agggttcagcccaccgaatcaatagtacggttcccaaatatcactaatctttgccccttcggggaagtatttaacgctactcgatttgctagcgtatatgcctggaaccggaagagaataagcaactgtgttgcagactatagcgtgctttacaattccgcatcctttagtaccttcaaatgttacggtgtgagccccaccaaactcaatgatctctgtttcacaaacgtgtacgcagatagtttcgttatacgcggggacgaagtacggcagatagcccctggccagacaggaaagatagccgattacaactacaaacttccagacgattttacagggtgtgtgatcgcttggaattcaaataacctggactccaaagtgggaggcaactataattacctgtaccgactgttccgcaaaagcaacttgaaacctttcgagcgagatatatcaaccgaaatctaccaagctggttctacaccttgtaatggtgtggagggatttaactgctacttccctcttcagtcctatggatttcagcctacaaatggagtcgggtatcaaccctatagagtcgtggtgttgtcatttgaacttctccatgcacctgctactgtctgtggtccaaaaaagtccggatccggcggcggcggtgacggtggtggcggctccggagacaagacccacacctgccccccttgtcctgcccctgagctgctgggcggaccctccgtgtttctgttcccccccaagcccaaggacaccctgatgatcagccggacccccgaggtcacctgcgtggtggtggacgtcagccacgaggacccagaggtcaagttcaattggtatgtggacggcgtggaggtgcacaacgccaagaccaagccccgggaggaacagtacaacagcacctaccgggtggtgtccgtgctgaccgtgctgcaccaggactggctgaacggcaaagaatacaagtgcaaggtgtccaacaaggccctgcctgcccccatcgagaaaaccatcagcaaggccaagggccagcccagagaaccccaggtgtacaccctgccccctagcagggaagagctgaccaagaaccaggtgtccctgacctgtctggtcaagggcttctaccccagcgatatcgccgtggagtgggagagcaacggccagcctgagaacaactacaagaccaccccccctgtgctggacagcgacggcagcttcttcctgtacagcaagctgaccgtggacaagagccggtggcagcagggcaacgtgtttagctgcagcgtgatgcacgaggccctgcacaaccactacacccagaagagcttaagcctgtcccctggcagt

SEQ ID NO: 1917 - protein, 207 aa, synthetic construct
NITNLCPFGEVFNATRFASVYAWNRKRISNCVADYSVLYNSASFSTFKCYGVSPTKLNDLCFTNVYADSFVIRGDEVRQIAPGQTGNIADYNYKLPDDFTGCVIAWNSNNLDSKVGGNYNYLYRLFRKSNLKPFERDISTEIYQAGSTPCNGVKGFNCYFPLQSYGFQPTYGVGYQPYRVVVLSFELLHAPATVCGPKKSTNLVKNK

SEQ ID NO: 1918 - protein, 207 aa, synthetic construct
NITNLCPFGEVFNATRFASVYAWNRKRISNCVADYSVLYNSASFSTFKCYGVSPTKLNDLCFTNVYADSFVIRGDEVRQIAPGQTGTIADYNYKLPDDFTGCVIAWNSNNLDSKVGGNYNYLYRLFRKSNLKPFERDISTEIYQAGSTPCNGVKGFNCYFPLQSYGFQPTYGVGYQPYRVVVLSFELLHAPATVCGPKKSTNLVKNK

SEQ ID NO: 1919 - protein, 207 aa, synthetic construct
NITNLCPFGEVFNATRFASVYAWNRKRISNCVADYSVLYNSASFSTFKCYGVSPTKLNDLCFTNVYADSFVIRGDEVRQIAPGQTGTIADYNYKLPDDFTGCVIAWNSNNLDSKVGGNYNYRYRLFRKSNLKPFERDISTEIYQAGSTPCNGVKGFNCYFPLQSYGFQPTYGVGYQPYRVVVLSFELLHAPATVCGPKKSTNLVKNK

SEQ ID NO: 1920 - protein, 207 aa, synthetic construct
NITNLCPFGEVFNATRFASVYAWNRKRISNCVADYSVLYNSASFSTFKCYGVSPTKLNDLCFTNVYADSFVIRGDEVRQIAPGQTGKIADYNYKLPDDFTGCVIAWNSNNLDSKVGGNYNYRYRLFRKSNLKPFERDISTEIYQAGSKPCNGVEGFNCYFPLQSYGFQPTNGVGYQPYRVVVLSFELLHAPATVCGPKKSTNLVKNK

SEQ ID NO: 1921 - protein, 207 aa, synthetic construct
NITNLCPFGEVFNATRFASVYAWNRKRISNCVADYSVLYNSASFSTFKCYGVSPTKLNDLCFTNVYADSFVIRGDEVRQIAPGQTGNIADYNYKLPDDFTGCVIAWNSNNLDSKVGGNYNYRYRLFRKSNLKPFERDISTEIYQAGSKPCNGVEGFNCYFPLQSYGFQPTNGVGYQPYRVVVLSFELLHAPATVCGPKKSTNLVKNK

SEQ ID NO: 1922 - protein, 207 aa, synthetic construct
NITNLCPFGEVFNATKFASVYAWNRKRISNCVADYSVLYNSASFSTFKCYGVSPTKLNDLCFTNVYADSFVIRGDEVRQIAPGQTGKIADYNYKLPDDFTGCVIAWNSNNLDSKVGGNYNYLYRLFRKSNLKPFERDISTEIYQAGSTPCNGVKGFNCYFPLQSYGFQPTYGVGYQPYRVVVLSFELLHAPATVCGPKKSTNLVKNK

SEQ ID NO: 1923 - protein, 207 aa, synthetic construct
NITNLCPFGEVFNATKFASVYAWNRKRISNCVADYSVLYNSASFSTFKCYGVSPTKLNDLCFTNVYADSFVIRGDEVRQIAPGQTGKIADYNYKLPDDFTGCVIAWNSNNLDSKVGGNYNYLYRLFRKSNLKPFERDISTEIYQAGSRPCNGVKGFNCYFPLQSYGFQPTNGVGYQPYRVVVLSFELLHAPATVCGPKKSTNLVKNK

SEQ ID NO: 1924 - protein, 207 aa, synthetic construct
NITNLCPFGEVFNATKFASVYAWNRKRISNCVADYSVLYNSASFSTFKCYGVSPTKLNDLCFTNVYADSFVIRGDEVRQIAPGQTGNIADYNYKLPDDFTGCVIAWNSNNLDSKVGGNYNYRYRLFRKSNLKPFERDISTEIYQAGSKPCNGVKGFNCYFPLQSYGFQPTYGVGYQPYRVVVLSFELLHAPATVCGPKKSTNLVKNK

SEQ ID NO: 1925 - protein, 207 aa, synthetic construct
NITNLCPFGEVFNATKFASVYAWNRKRISNCVADYSVLYNSASFSTFKCYGVSPTKLNDLCFTNVYADSFVIRGDEVRQIAPGQTGNIADYNYKLPDDFTGCVIAWNSNNLDSKVGGNYNYRYRLFRKSNLKPFERDISTEIYQAGSRPCNGVKGFNCYFPLQSYGFQPTYGVGYQPYRVVVLSFELLHAPATVCGPKKSTNLVKNK

SEQ ID NO: 1926 - protein, 207 aa, synthetic construct
NITNLCPFDEVFNATRFASVYAWNRKRISNCVADYSVLYNLAPFFTFKCYGVSPTKLNDLCFTNVYADSFVIRGDEVRQIAPGQTGNIADYNYKLPDDFTGCVIAWNSKNLDSKVSGNYNYLYRLFRKSNLKPFERDISTEIYQAGNKPCNGVAGFNCYFPLKSYSFRPTYGVGHQPYRVVVLSFELLHAPATVCGPKKSTNLVKNK

SEQ ID NO: 1927 - protein, 207 aa, synthetic construct
NITNLCPFDEVFNATRFASVYAWNRKRISNCVADYSVLYNLAPFFTFKCYGVSPTKLNDLCFTNVYADSFVIRGDEVRQIAPGQTGNIADYNYKLPDDFTGCVIAWNSKNLDSKVSGNYNYLYRLFRKSNLKPFERDISTEIYQAGNKPCNGVAGFNCYFPLRSYSFRPTYGVGHQPYRVVVLSFELLHAPATVCGPKKSTNLVKNK

SEQ ID NO: 1928 - protein, 207 aa, synthetic construct
NITNLCPFDEVFNATKFASVYAWNRKRISNCVADYSVLYNLAPFFTFKCYGVSPTKLNDLCFTNVYADSFVIRGDEVRQIAPGQTGNIADYNYKLPDDFTGCVIAWNSKNLDSKVSGNYNYRYRLFRKSNLKPFERDISTEIYQAGNKPCNGVKGFNCYFPLRSYSFRPTYGVGHQPYRVVVLSFELLHAPATVCGPKKSTNLVKNK

SEQ ID NO: 1929 - protein, 207 aa, synthetic construct
NITNLCPFDEVFNATKFASVYAWNRKRISNCVADYSVLYNLAPFFTFKCYGVSPTKLNDLCFTNVYADSFVIRGDEVRQIAPGQTGNIADYNYKLPDDFTGCVIAWNSKNLDSKVSGNYNYRYRLFRKSNLKPFERDISTEIYQAGNKPCNGVAGFNCYFPLRSYSFRPTYGVGHQPYRVVVLSFELLHAPATVCGPKKSTNLVKNK

SEQ ID NO: 1930 - protein, 207 aa, synthetic construct
NITNLCPFDEVFNATKFASVYAWNRKRISNCVADYSVLYNLAPFFTFKCYGVSPTKLNDLCFTNVYADSFVIRGDEVRQIAPGQTGNIADYNYKLPDDFTGCVIAWNSKNLDSKVSGNYNYRYRLFRKSNLKPFERDISTEIYQAGNRPCNGVAGFNCYFPLRSYSFRPTYGVGHQPYRVVVLSFELLHAPATVCGPKKSTNLVKNK

SEQ ID NO: 1931 - protein, 207 aa, synthetic construct
NITNLCPFDEVFNATKFASVYAWNRKRISNCVADYSVLYNLAPFFTFKCYGVSPTKLNDLCFTNVYADSFVIRGDEVRQIAPGQTGNIADYNYKLPDDFTGCVIAWNSKNLDSKVSGNYNYRYRLFRKSNLKPFERDISTEIYQAGNRPCNGVKGFNCYFPLRSYSFRPTYGVGHQPYRVVVLSFELLHAPATVCGPKKSTNLVKNK

SEQ ID NO: 1932 - protein, 486 aa, synthetic construct
RVQPTESIVRFPNITNLCPFGEVFNATRFASVYAWNRKRISNCVADYSVLYNSASFSTFKCYGVSPTKLNDLCFTNVYADSFVIRGDEVRQIAPGQTGKIADYNYKLPDDFTGCVIAWNSNNLDSKVGGNYNYLYRLFRKSNLKPFERDISTEIYQAGSTPCNGVEGFNCYFPLQSYGFQPTNGVGYQPYRVVVLSFELLHAPATVCGPKKSTNLVKNKCVNFNFNGLTGTGVLTESGSGGGGSGGGGSRVQPTESIVRFPNITNLCPFGEVFNATRFASVYAWNRKRISNCVADYSVLYNSASFSTFKCYGVSPTKLNDLCFTNVYADSFVIRGDEVRQIAPGQTGKIADYNYKLPDDFTGCVIAWNSNNLDSKVGGNYNYLYRLFRKSNLKPFERDISTEIYQAGSTPCNGVEGFNCYFPLQSYGFQPTNGVGYQPYRVVVLSFELLHAPATVCGPKKSTNLVKNKCVNFNFNGLTGTGVLTES

SEQ ID NO: 1933 - protein, 426 aa, synthetic construct
NITNLCPFGEVFNATRFASVYAWNRKRISNCVADYSVLYNSASFSTFKCYGVSPTKLNDLCFTNVYADSFVIRGDEVRQIAPGQTGNIADYNYKLPDDFTGCVIAWNSNNLDSKVGGNYNYLYRLFRKSNLKPFERDISTEIYQAGSTPCNGVKGFNCYFPLQSYGFQPTYGVGYQPYRVVVLSFELLHAPATVCGPKKSTNLVKNKGSGGGGSGGGGSNITNLCPFGEVFNATRFASVYAWNRKRISNCVADYSVLYNSASFSTFKCYGVSPTKLNDLCFTNVYADSFVIRGDEVRQIAPGQTGNIADYNYKLPDDFTGCVIAWNSNNLDSKVGGNYNYLYRLFRKSNLKPFERDISTEIYQAGSTPCNGVKGFNCYFPLQSYGFQPTYGVGYQPYRVVVLSFELLHAPATVCGPKKSTNLVKNK

SEQ ID NO: 1934 - protein, 426 aa, synthetic construct
NITNLCPFGEVFNATRFASVYAWNRKRISNCVADYSVLYNSASFSTFKCYGVSPTKLNDLCFTNVYADSFVIRGDEVRQIAPGQTGTIADYNYKLPDDFTGCVIAWNSNNLDSKVGGNYNYLYRLFRKSNLKPFERDISTEIYQAGSTPCNGVKGFNCYFPLQSYGFQPTYGVGYQPYRVVVLSFELLHAPATVCGPKKSTNLVKNKGSGGGGSGGGGSNITNLCPFGEVFNATRFASVYAWNRKRISNCVADYSVLYNSASFSTFKCYGVSPTKLNDLCFTNVYADSFVIRGDEVRQIAPGQTGTIADYNYKLPDDFTGCVIAWNSNNLDSKVGGNYNYLYRLFRKSNLKPFERDISTEIYQAGSTPCNGVKGFNCYFPLQSYGFQPTYGVGYQPYRVVVLSFELLHAPATVCGPKKSTNLVKNK

SEQ ID NO: 1935 - protein, 426 aa, synthetic construct
NITNLCPFGEVFNATRFASVYAWNRKRISNCVADYSVLYNSASFSTFKCYGVSPTKLNDLCFTNVYADSFVIRGDEVRQIAPGQTGKIADYNYKLPDDFTGCVIAWNSNNLDSKVGGNYNYRYRLFRKSNLKPFERDISTEIYQAGSKPCNGVEGFNCYFPLQSYGFQPTNGVGYQPYRVVVLSFELLHAPATVCGPKKSTNLVKNKGSGGGGSGGGGSNITNLCPFGEVFNATRFASVYAWNRKRISNCVADYSVLYNSASFSTFKCYGVSPTKLNDLCFTNVYADSFVIRGDEVRQIAPGQTGKIADYNYKLPDDFTGCVIAWNSNNLDSKVGGNYNYRYRLFRKSNLKPFERDISTEIYQAGSKPCNGVEGFNCYFPLQSYGFQPTNGVGYQPYRVVVLSFELLHAPATVCGPKKSTNLVKNK

SEQ ID NO: 1936 - protein, 426 aa, synthetic construct
NITNLCPFGEVFNATRFASVYAWNRKRISNCVADYSVLYNSASFSTFKCYGVSPTKLNDLCFTNVYADSFVIRGDEVRQIAPGQTGNIADYNYKLPDDFTGCVIAWNSNNLDSKVGGNYNYRYRLFRKSNLKPFERDISTEIYQAGSKPCNGVEGFNCYFPLQSYGFQPTNGVGYQPYRVVVLSFELLHAPATVCGPKKSTNLVKNKGSGGGGSGGGGSNITNLCPFGEVFNATRFASVYAWNRKRISNCVADYSVLYNSASFSTFKCYGVSPTKLNDLCFTNVYADSFVIRGDEVRQIAPGQTGNIADYNYKLPDDFTGCVIAWNSNNLDSKVGGNYNYRYRLFRKSNLKPFERDISTEIYQAGSKPCNGVEGFNCYFPLQSYGFQPTNGVGYQPYRVVVLSFELLHAPATVCGPKKSTNLVKNK

SEQ ID NO: 1937 - protein, 426 aa, synthetic construct
NITNLCPFGEVFNATKFASVYAWNRKRISNCVADYSVLYNSASFSTFKCYGVSPTKLNDLCFTNVYADSFVIRGDEVRQIAPGQTGKIADYNYKLPDDFTGCVIAWNSNNLDSKVGGNYNYLYRLFRKSNLKPFERDISTEIYQAGSTPCNGVKGFNCYFPLQSYGFQPTYGVGYQPYRVVVLSFELLHAPATVCGPKKSTNLVKNKGSGGGGSGGGGSNITNLCPFGEVFNATKFASVYAWNRKRISNCVADYSVLYNSASFSTFKCYGVSPTKLNDLCFTNVYADSFVIRGDEVRQIAPGQTGKIADYNYKLPDDFTGCVIAWNSNNLDSKVGGNYNYLYRLFRKSNLKPFERDISTEIYQAGSTPCNGVKGFNCYFPLQSYGFQPTYGVGYQPYRVVVLSFELLHAPATVCGPKKSTNLVKNK

SEQ ID NO: 1938 - protein, 426 aa, synthetic construct
NITNLCPFGEVFNATKFASVYAWNRKRISNCVADYSVLYNSASFSTFKCYGVSPTKLNDLCFTNVYADSFVIRGDEVRQIAPGQTGKIADYNYKLPDDFTGCVIAWNSNNLDSKVGGNYNYLYRLFRKSNLKPFERDISTEIYQAGSRPCNGVKGFNCYFPLQSYGFQPTNGVGYQPYRVVVLSFELLHAPATVCGPKKSTNLVKNKGSGGGGSGGGGSNITNLCPFGEVFNATKFASVYAWNRKRISNCVADYSVLYNSASFSTFKCYGVSPTKLNDLCFTNVYADSFVIRGDEVRQIAPGQTGKIADYNYKLPDDFTGCVIAWNSNNLDSKVGGNYNYLYRLFRKSNLKPFERDISTEIYQAGSRPCNGVKGFNCYFPLQSYGFQPTNGVGYQPYRVVVLSFELLHAPATVCGPKKSTNLVKNK

SEQ ID NO: 1939 - protein, 426 aa, synthetic construct
NITNLCPFGEVFNATKFASVYAWNRKRISNCVADYSVLYNSASFSTFKCYGVSPTKLNDLCFTNVYADSFVIRGDEVRQIAPGQTGNIADYNYKLPDDFTGCVIAWNSNNLDSKVGGNYNYRYRLFRKSNLKPFERDISTEIYQAGSKPCNGVKGFNCYFPLQSYGFQPTYGVGYQPYRVVVLSFELLHAPATVCGPKKSTNLVKNKGSGGGGSGGGGSNITNLCPFGEVFNATKFASVYAWNRKRISNCVADYSVLYNSASFSTFKCYGVSPTKLNDLCFTNVYADSFVIRGDEVRQIAPGQTGNIADYNYKLPDDFTGCVIAWNSNNLDSKVGGNYNYRYRLFRKSNLKPFERDISTEIYQAGSKPCNGVKGFNCYFPLQSYGFQPTYGVGYQPYRVVVLSFELLHAPATVCGPKKSTNLVKNK

SEQ ID NO: 1940 - protein, 426 aa, synthetic construct
NITNLCPFGEVFNATKFASVYAWNRKRISNCVADYSVLYNSASFSTFKCYGVSPTKLNDLCFTNVYADSFVIRGDEVRQIAPGQTGNIADYNYKLPDDFTGCVIAWNSNNLDSKVGGNYNYRYRLFRKSNLKPFERDISTEIYQAGSRPCNGVKGFNCYFPLQSYGFQPTYGVGYQPYRVVVLSFELLHAPATVCGPKKSTNLVKNKGSGGGGSGGGGSNITNLCPFGEVFNATKFASVYAWNRKRISNCVADYSVLYNSASFSTFKCYGVSPTKLNDLCFTNVYADSFVIRGDEVRQIAPGQTGNIADYNYKLPDDFTGCVIAWNSNNLDSKVGGNYNYRYRLFRKSNLKPFERDISTEIYQAGSRPCNGVKGFNCYFPLQSYGFQPTYGVGYQPYRVVVLSFELLHAPATVCGPKKSTNLVKNK

SEQ ID NO: 1941 - protein, 426 aa, synthetic construct
NITNLCPFDEVFNATRFASVYAWNRKRISNCVADYSVLYNLAPFFTFKCYGVSPTKLNDLCFTNVYADSFVIRGDEVRQIAPGQTGNIADYNYKLPDDFTGCVIAWNSNKLDSKVSGNYNYLYRLFRKSNLKPFERDISTEIYQAGNKPCNGVAGFNCYFPLKSYSFRPTYGVGHQPYRVVVLSFELLHAPATVCGPKKSTNLVKNKGSGGGGSGGGGSNITNLCPFDEVFNATRFASVYAWNRKRISNCVADYSVLYNLAPFFTFKCYGVSPTKLNDLCFTNVYADSFVIRGDEVRQIAPGQTGNIADYNYKLPDDFTGCVIAWNSNKLDSKVSGNYNYLYRLFRKSNLKPFERDISTEIYQAGNKPCNGVAGFNCYFPLKSYSFRPTYGVGHQPYRVVVLSFELLHAPATVCGPKKSTNLVKNK

SEQ ID NO: 1942 - protein, 426 aa, synthetic construct
NITNLCPFDEVFNATRFASVYAWNRKRISNCVADYSVLYNLAPFFTFKCYGVSPTKLNDLCFTNVYADSFVIRGDEVRQIAPGQTGNIADYNYKLPDDFTGCVIAWNSNKLDSKVSGNYNYLYRLFRKSNLKPFERDISTEIYQAGNKPCNGVAGFNCYFPLRSYSFRPTYGVGHQPYRVVVLSFELLHAPATVCGPKKSTNLVKNKGSGGGGSGGGGSNITNLCPFDEVFNATRFASVYAWNRKRISNCVADYSVLYNLAPFFTFKCYGVSPTKLNDLCFTNVYADSFVIRGDEVRQIAPGQTGNIADYNYKLPDDFTGCVIAWNSNKLDSKVSGNYNYLYRLFRKSNLKPFERDISTEIYQAGNKPCNGVAGFNCYFPLRSYSFRPTYGVGHQPYRVVVLSFELLHAPATVCGPKKSTNLVKNK

SEQ ID NO: 1943 - protein, 426 aa, synthetic construct
NITNLCPFDEVFNATKFASVYAWNRKRISNCVADYSVLYNLAPFFTFKCYGVSPTKLNDLCFTNVYADSFVIRGDEVRQIAPGQTGNIADYNYKLPDDFTGCVIAWNSNKLDSKVSGNYNYRYRLFRKSNLKPFERDISTEIYQAGNKPCNGVKGFNCYFPLRSYSFRPTYGVGHQPYRVVVLSFELLHAPATVCGPKKSTNLVKNKGSGGGGSGGGGSNITNLCPFDEVFNATKFASVYAWNRKRISNCVADYSVLYNLAPFFTFKCYGVSPTKLNDLCFTNVYADSFVIRGDEVRQIAPGQTGNIADYNYKLPDDFTGCVIAWNSNKLDSKVSGNYNYRYRLFRKSNLKPFERDISTEIYQAGNKPCNGVKGFNCYFPLRSYSFRPTYGVGHQPYRVVVLSFELLHAPATVCGPKKSTNLVKNK

SEQ ID NO: 1944 - protein, 426 aa, synthetic construct
NITNLCPFDEVFNATKFASVYAWNRKRISNCVADYSVLYNLAPFFTFKCYGVSPTKLNDLCFTNVYADSFVIRGDEVRQIAPGQTGNIADYNYKLPDDFTGCVIAWNSNKLDSKVSGNYNYRYRLFRKSNLKPFERDISTEIYQAGNKPCNGVAGFNCYFPLRSYSFRPTYGVGHQPYRVVVLSFELLHAPATVCGPKKSTNLVKNKGSGGGGSGGGGSNITNLCPFDEVFNATKFASVYAWNRKRISNCVADYSVLYNLAPFFTFKCYGVSPTKLNDLCFTNVYADSFVIRGDEVRQIAPGQTGNIADYNYKLPDDFTGCVIAWNSNKLDSKVSGNYNYRYRLFRKSNLKPFERDISTEIYQAGNKPCNGVAGFNCYFPLRSYSFRPTYGVGHQPYRVVVLSFELLHAPATVCGPKKSTNLVKNK

SEQ ID NO: 1945 - protein, 426 aa, synthetic construct
NITNLCPFDEVFNATKFASVYAWNRKRISNCVADYSVLYNLAPFFTFKCYGVSPTKLNDLCFTNVYADSFVIRGDEVRQIAPGQTGNIADYNYKLPDDFTGCVIAWNSNKLDSKVSGNYNYRYRLFRKSNLKPFERDISTEIYQAGNRPCNGVAGFNCYFPLRSYSFRPTYGVGHQPYRVVVLSFELLHAPATVCGPKKSTNLVKNKGSGGGGSGGGGSNITNLCPFDEVFNATKFASVYAWNRKRISNCVADYSVLYNLAPFFTFKCYGVSPTKLNDLCFTNVYADSFVIRGDEVRQIAPGQTGNIADYNYKLPDDFTGCVIAWNSNKLDSKVSGNYNYRYRLFRKSNLKPFERDISTEIYQAGNRPCNGVAGFNCYFPLRSYSFRPTYGVGHQPYRVVVLSFELLHAPATVCGPKKSTNLVKNK

SEQ ID NO: 1946 - protein, 426 aa, synthetic construct
NITNLCPFDEVFNATKFASVYAWNRKRISNCVADYSVLYNLAPFFTFKCYGVSPTKLNDLCFTNVYADSFVIRGDEVRQIAPGQTGNIADYNYKLPDDFTGCVIAWNSNKLDSKVSGNYNYRYRLFRKSNLKPFERDISTEIYQAGNRPCNGVKGFNCYFPLRSYSFRPTYGVGHQPYRVVVLSFELLHAPATVCGPKKSTNLVKNKGSGGGGSGGGGSNITNLCPFDEVFNATKFASVYAWNRKRISNCVADYSVLYNLAPFFTFKCYGVSPTKLNDLCFTNVYADSFVIRGDEVRQIAPGQTGNIADYNYKLPDDFTGCVIAWNSNKLDSKVSGNYNYRYRLFRKSNLKPFERDISTEIYQAGNRPCNGVKGFNCYFPLRSYSFRPTYGVGHQPYRVVVLSFELLHAPATVCGPKKSTNLVKNK

SEQ ID NO: 1947 - protein, 447 aa, synthetic construct
NITNLCPFGEVFNATRFASVYAWNRKRISNCVADYSVLYNSASFSTFKCYGVSPTKLNDLCFTNVYADSFVIRGDEVRQIAPGQTGNIADYNYKLPDDFTGCVIAWNSNNLDSKVGGNYNYLYRLFRKSNLKPFERDISTEIYQAGSTPCNGVKGFNCYFPLQSYGFQPTYGVGYQPYRVVVLSFELLHAPATVCGPKKSTNLVKNKGSGGGGDGGGGSGDKTHTCPPCPAPELLGGPSVFLFPPKPKDTLMISRTPEVTCVVVDVSHEDPEVKFNWYVDGVEVHNAKTKPREEQYNSTYRVVSVLTVLHQDWLNGKEYKCKVSNKALPAPIEKTISKAKGQPREPQVYTLPPSREELTKNQVSLTCLVKGFYPSDIAVEWESNGQPENNYKTTPPVLDSDGSFFLYSKLTVDKSRWQQGNVFSCSVMHEALHNHYTQKSLSLSPGS

SEQ ID NO: 1948 - protein, 447 aa, synthetic construct
NITNLCPFGEVFNATRFASVYAWNRKRISNCVADYSVLYNSASFSTFKCYGVSPTKLNDLCFTNVYADSFVIRGDEVRQIAPGQTGTIADYNYKLPDDFTGCVIAWNSNNLDSKVGGNYNYLYRLFRKSNLKPFERDISTEIYQAGSTPCNGVKGFNCYFPLQSYGFQPTYGVGYQPYRVVVLSFELLHAPATVCGPKKSTNLVKNKGSGGGGDGGGGSGDKTHTCPPCPAPELLGGPSVFLFPPKPKDTLMISRTPEVTCVVVDVSHEDPEVKFNWYVDGVEVHNAKTKPREEQYNSTYRVVSVLTVLHQDWLNGKEYKCKVSNKALPAPIEKTISKAKGQPREPQVYTLPPSREELTKNQVSLTCLVKGFYPSDIAVEWESNGQPENNYKTTPPVLDSDGSFFLYSKLTVDKSRWQQGNVFSCSVMHEALHNHYTQKSLSLSPGS

SEQ ID NO: 1949 - protein, 447 aa, synthetic construct
NITNLCPFGEVFNATRFASVYAWNRKRISNCVADYSVLYNSASFSTFKCYGVSPTKLNDLCFTNVYADSFVIRGDEVRQIAPGQTGTIADYNYKLPDDFTGCVIAWNSNNLDSKVGGNYNYRYRLFRKSNLKPFERDISTEIYQAGSTPCNGVKGFNCYFPLQSYGFQPTYGVGYQPYRVVVLSFELLHAPATVCGPKKSTNLVKNKGSGGGGDGGGGSGDKTHTCPPCPAPELLGGPSVFLFPPKPKDTLMISRTPEVTCVVVDVSHEDPEVKFNWYVDGVEVHNAKTKPREEQYNSTYRVVSVLTVLHQDWLNGKEYKCKVSNKALPAPIEKTISKAKGQPREPQVYTLPPSREELTKNQVSLTCLVKGFYPSDIAVEWESNGQPENNYKTTPPVLDSDGSFFLYSKLTVDKSRWQQGNVFSCSVMHEALHNHYTQKSLSLSPGS

SEQ ID NO: 1950 - protein, 447 aa, synthetic construct
NITNLCPFGEVFNATRFASVYAWNRKRISNCVADYSVLYNSASFSTFKCYGVSPTKLNDLCFTNVYADSFVIRGDEVRQIAPGQTGKIADYNYKLPDDFTGCVIAWNSNNLDSKVGGNYNYRYRLFRKSNLKPFERDISTEIYQAGSKPCNGVEGFNCYFPLQSYGFQPTNGVGYQPYRVVVLSFELLHAPATVCGPKKSTNLVKNKGSGGGGDGGGGSGDKTHTCPPCPAPELLGGPSVFLFPPKPKDTLMISRTPEVTCVVVDVSHEDPEVKFNWYVDGVEVHNAKTKPREEQYNSTYRVVSVLTVLHQDWLNGKEYKCKVSNKALPAPIEKTISKAKGQPREPQVYTLPPSREELTKNQVSLTCLVKGFYPSDIAVEWESNGQPENNYKTTPPVLDSDGSFFLYSKLTVDKSRWQQGNVFSCSVMHEALHNHYTQKSLSLSPGS

SEQ ID NO: 1951 - protein, 447 aa, synthetic construct
NITNLCPFGEVFNATRFASVYAWNRKRISNCVADYSVLYNSASFSTFKCYGVSPTKLNDLCFTNVYADSFVIRGDEVRQIAPGQTGNIADYNYKLPDDFTGCVIAWNSNNLDSKVGGNYNYRYRLFRKSNLKPFERDISTEIYQAGSKPCNGVEGFNCYFPLQSYGFQPTNGVGYQPYRVVVLSFELLHAPATVCGPKKSTNLVKNKGSGGGGDGGGGSGDKTHTCPPCPAPELLGGPSVFLFPPKPKDTLMISRTPEVTCVVVDVSHEDPEVKFNWYVDGVEVHNAKTKPREEQYNSTYRVVSVLTVLHQDWLNGKEYKCKVSNKALPAPIEKTISKAKGQPREPQVYTLPPSREELTKNQVSLTCLVKGFYPSDIAVEWESNGQPENNYKTTPPVLDSDGSFFLYSKLTVDKSRWQQGNVFSCSVMHEALHNHYTQKSLSLSPGS

SEQ ID NO: 1952 - protein, 447 aa, synthetic construct
NITNLCPFGEVFNATKFASVYAWNRKRISNCVADYSVLYNSASFSTFKCYGVSPTKLNDLCFTNVYADSFVIRGDEVRQIAPGQTGKIADYNYKLPDDFTGCVIAWNSNNLDSKVGGNYNYLYRLFRKSNLKPFERDISTEIYQAGSTPCNGVKGFNCYFPLQSYGFQPTYGVGYQPYRVVVLSFELLHAPATVCGPKKSTNLVKNKGSGGGGDGGGGSGDKTHTCPPCPAPELLGGPSVFLFPPKPKDTLMISRTPEVTCVVVDVSHEDPEVKFNWYVDGVEVHNAKTKPREEQYNSTYRVVSVLTVLHQDWLNGKEYKCKVSNKALPAPIEKTISKAKGQPREPQVYTLPPSREELTKNQVSLTCLVKGFYPSDIAVEWESNGQPENNYKTTPPVLDSDGSFFLYSKLTVDKSRWQQGNVFSCSVMHEALHNHYTQKSLSLSPGS

SEQ ID NO: 1953 - protein, 447 aa, synthetic construct
NITNLCPFGEVFNATKFASVYAWNRKRISNCVADYSVLYNSASFSTFKCYGVSPTKLNDLCFTNVYADSFVIRGDEVRQIAPGQTGKIADYNYKLPDDFTGCVIAWNSNNLDSKVGGNYNYLYRLFRKSNLKPFERDISTEIYQAGSRPCNGVKGFNCYFPLQSYGFQPTNGVGYQPYRVVVLSFELLHAPATVCGPKKSTNLVKNKGSGGGGDGGGGSGDKTHTCPPCPAPELLGGPSVFLFPPKPKDTLMISRTPEVTCVVVDVSHEDPEVKFNWYVDGVEVHNAKTKPREEQYNSTYRVVSVLTVLHQDWLNGKEYKCKVSNKALPAPIEKTISKAKGQPREPQVYTLPPSREELTKNQVSLTCLVKGFYPSDIAVEWESNGQPENNYKTTPPVLDSDGSFFLYSKLTVDKSRWQQGNVFSCSVMHEALHNHYTQKSLSLSPGS

SEQ ID NO: 1954 - protein, 447 aa, synthetic construct
NITNLCPFGEVFNATKFASVYAWNRKRISNCVADYSVLYNSASFSTFKCYGVSPTKLNDLCFTNVYADSFVIRGDEVRQIAPGQTGNIADYNYKLPDDFTGCVIAWNSNNLDSKVGGNYNYRYRLFRKSNLKPFERDISTEIYQAGSKPCNGVKGFNCYFPLQSYGFQPTYGVGYQPYRVVVLSFELLHAPATVCGPKKSTNLVKNKGSGGGGDGGGGSGDKTHTCPPCPAPELLGGPSVFLFPPKPKDTLMISRTPEVTCVVVDVSHEDPEVKFNWYVDGVEVHNAKTKPREEQYNSTYRVVSVLTVLHQDWLNGKEYKCKVSNKALPAPIEKTISKAKGQPREPQVYTLPPSREELTKNQVSLTCLVKGFYPSDIAVEWESNGQPENNYKTTPPVLDSDGSFFLYSKLTVDKSRWQQGNVFSCSVMHEALHNHYTQKSLSLSPGS

SEQ ID NO: 1955 - protein, 447 aa, synthetic construct
NITNLCPFGEVFNATKFASVYAWNRKRISNCVADYSVLYNSASFSTFKCYGVSPTKLNDLCFTNVYADSFVIRGDEVRQIAPGQTGNIADYNYKLPDDFTGCVIAWNSNNLDSKVGGNYNYRYRLFRKSNLKPFERDISTEIYQAGSRPCNGVKGFNCYFPLQSYGFQPTYGVGYQPYRVVVLSFELLHAPATVCGPKKSTNLVKNKGSGGGGDGGGGSGDKTHTCPPCPAPELLGGPSVFLFPPKPKDTLMISRTPEVTCVVVDVSHEDPEVKFNWYVDGVEVHNAKTKPREEQYNSTYRVVSVLTVLHQDWLNGKEYKCKVSNKALPAPIEKTISKAKGQPREPQVYTLPPSREELTKNQVSLTCLVKGFYPSDIAVEWESNGQPENNYKTTPPVLDSDGSFFLYSKLTVDKSRWQQGNVFSCSVMHEALHNHYTQKSLSLSPGS

SEQ ID NO: 1956 - protein, 447 aa, synthetic construct
NITNLCPFDEVFNATRFASVYAWNRKRISNCVADYSVLYNLAPFFTFKCYGVSPTKLNDLCFTNVYADSFVIRGDEVRQIAPGQTGNIADYNYKLPDDFTGCVIAWNSKNLDSKVSGNYNYLYRLFRKSNLKPFERDISTEIYQAGNKPCNGVAGFNCYFPLKSYSFRPTYGVGHQPYRVVVLSFELLHAPATVCGPKKSTNLVKNKGSGGGGDGGGGSGDKTHTCPPCPAPELLGGPSVFLFPPKPKDTLMISRTPEVTCVVVDVSHEDPEVKFNWYVDGVEVHNAKTKPREEQYNSTYRVVSVLTVLHQDWLNGKEYKCKVSNKALPAPIEKTISKAKGQPREPQVYTLPPSREELTKNQVSLTCLVKGFYPSDIAVEWESNGQPENNYKTTPPVLDSDGSFFLYSKLTVDKSRWQQGNVFSCSVMHEALHNHYTQKSLSLSPGS

SEQ ID NO: 1957 - protein, 447 aa, synthetic construct
NITNLCPFDEVFNATRFASVYAWNRKRISNCVADYSVLYNLAPFFTFKCYGVSPTKLNDLCFTNVYADSFVIRGDEVRQIAPGQTGNIADYNYKLPDDFTGCVIAWNSKNLDSKVSGNYNYLYRLFRKSNLKPFERDISTEIYQAGNKPCNGVAGFNCYFPLRSYSFRPTYGVGHQPYRVVVLSFELLHAPATVCGPKKSTNLVKNKGSGGGGDGGGGSGDKTHTCPPCPAPELLGGPSVFLFPPKPKDTLMISRTPEVTCVVVDVSHEDPEVKFNWYVDGVEVHNAKTKPREEQYNSTYRVVSVLTVLHQDWLNGKEYKCKVSNKALPAPIEKTISKAKGQPREPQVYTLPPSREELTKNQVSLTCLVKGFYPSDIAVEWESNGQPENNYKTTPPVLDSDGSFFLYSKLTVDKSRWQQGNVFSCSVMHEALHNHYTQKSLSLSPGS

SEQ ID NO: 1958 - protein, 447 aa, synthetic construct
NITNLCPFDEVFNATKFASVYAWNRKRISNCVADYSVLYNLAPFFTFKCYGVSPTKLNDLCFTNVYADSFVIRGDEVRQIAPGQTGNIADYNYKLPDDFTGCVIAWNSKNLDSKVSGNYNYRYRLFRKSNLKPFERDISTEIYQAGNKPCNGVKGFNCYFPLRSYSFRPTYGVGHQPYRVVVLSFELLHAPATVCGPKKSTNLVKNKGSGGGGDGGGGSGDKTHTCPPCPAPELLGGPSVFLFPPKPKDTLMISRTPEVTCVVVDVSHEDPEVKFNWYVDGVEVHNAKTKPREEQYNSTYRVVSVLTVLHQDWLNGKEYKCKVSNKALPAPIEKTISKAKGQPREPQVYTLPPSREELTKNQVSLTCLVKGFYPSDIAVEWESNGQPENNYKTTPPVLDSDGSFFLYSKLTVDKSRWQQGNVFSCSVMHEALHNHYTQKSLSLSPGS

SEQ ID NO: 1959 - protein, 447 aa, synthetic construct
NITNLCPFDEVFNATKFASVYAWNRKRISNCVADYSVLYNLAPFFTFKCYGVSPTKLNDLCFTNVYADSFVIRGDEVRQIAPGQTGNIADYNYKLPDDFTGCVIAWNSKNLDSKVSGNYNYRYRLFRKSNLKPFERDISTEIYQAGNKPCNGVAGFNCYFPLRSYSFRPTYGVGHQPYRVVVLSFELLHAPATVCGPKKSTNLVKNKGSGGGGDGGGGSGDKTHTCPPCPAPELLGGPSVFLFPPKPKDTLMISRTPEVTCVVVDVSHEDPEVKFNWYVDGVEVHNAKTKPREEQYNSTYRVVSVLTVLHQDWLNGKEYKCKVSNKALPAPIEKTISKAKGQPREPQVYTLPPSREELTKNQVSLTCLVKGFYPSDIAVEWESNGQPENNYKTTPPVLDSDGSFFLYSKLTVDKSRWQQGNVFSCSVMHEALHNHYTQKSLSLSPGS

SEQ ID NO: 1960 - protein, 447 aa, synthetic construct
NITNLCPFDEVFNATKFASVYAWNRKRISNCVADYSVLYNLAPFFTFKCYGVSPTKLNDLCFTNVYADSFVIRGDEVRQIAPGQTGNIADYNYKLPDDFTGCVIAWNSKNLDSKVSGNYNYRYRLFRKSNLKPFERDISTEIYQAGNRPCNGVAGFNCYFPLRSYSFRPTYGVGHQPYRVVVLSFELLHAPATVCGPKKSTNLVKNKGSGGGGDGGGGSGDKTHTCPPCPAPELLGGPSVFLFPPKPKDTLMISRTPEVTCVVVDVSHEDPEVKFNWYVDGVEVHNAKTKPREEQYNSTYRVVSVLTVLHQDWLNGKEYKCKVSNKALPAPIEKTISKAKGQPREPQVYTLPPSREELTKNQVSLTCLVKGFYPSDIAVEWESNGQPENNYKTTPPVLDSDGSFFLYSKLTVDKSRWQQGNVFSCSVMHEALHNHYTQKSLSLSPGS

SEQ ID NO: 1961 - protein, 447 aa, synthetic construct
NITNLCPFDEVFNATKFASVYAWNRKRISNCVADYSVLYNLAPFFTFKCYGVSPTKLNDLCFTNVYADSFVIRGDEVRQIAPGQTGNIADYNYKLPDDFTGCVIAWNSKNLDSKVSGNYNYRYRLFRKSNLKPFERDISTEIYQAGNRPCNGVKGFNCYFPLRSYSFRPTYGVGHQPYRVVVLSFELLHAPATVCGPKKSTNLVKNKGSGGGGDGGGGSGDKTHTCPPCPAPELLGGPSVFLFPPKPKDTLMISRTPEVTCVVVDVSHEDPEVKFNWYVDGVEVHNAKTKPREEQYNSTYRVVSVLTVLHQDWLNGKEYKCKVSNKALPAPIEKTISKAKGQPREPQVYTLPPSREELTKNQVSLTCLVKGFYPSDIAVEWESNGQPENNYKTTPPVLDSDGSFFLYSKLTVDKSRWQQGNVFSCSVMHEALHNHYTQKSLSLSPGS

SEQ ID NO: 1962 - protein, 726 aa, synthetic construct
RVQPTESIVRFPNITNLCPFGEVFNATRFASVYAWNRKRISNCVADYSVLYNSASFSTFKCYGVSPTKLNDLCFTNVYADSFVIRGDEVRQIAPGQTGKIADYNYKLPDDFTGCVIAWNSNNLDSKVGGNYNYLYRLFRKSNLKPFERDISTEIYQAGSTPCNGVEGFNCYFPLQSYGFQPTNGVGYQPYRVVVLSFELLHAPATVCGPKKSTNLVKNKCVNFNFNGLTGTGVLTESGSGGGGSGGGGSRVQPTESIVRFPNITNLCPFGEVFNATRFASVYAWNRKRISNCVADYSVLYNSASFSTFKCYGVSPTKLNDLCFTNVYADSFVIRGDEVRQIAPGQTGKIADYNYKLPDDFTGCVIAWNSNNLDSKVGGNYNYLYRLFRKSNLKPFERDISTEIYQAGSTPCNGVEGFNCYFPLQSYGFQPTNGVGYQPYRVVVLSFELLHAPATVCGPKKSTNLVKNKCVNFNFNGLTGTGVLTESGSGGGGDGGGGSGDKTHTCPPCPAPELLGGPSVFLFPPKPKDTLMISRTPEVTCVVVDVSHEDPEVKFNWYVDGVEVHNAKTKPREEQYNSTYRVVSVLTVLHQDWLNGKEYKCKVSNKALPAPIEKTISKAKGQPREPQVYTLPPSREELTKNQVSLTCLVKGFYPSDIAVEWESNGQPENNYKTTPPVLDSDGSFFLYSKLTVDKSRWQQGNVFSCSVMHEALHNHYTQKSLSLSPGS

SEQ ID NO: 1963 - protein, 666 aa, synthetic construct
NITNLCPFGEVFNATRFASVYAWNRKRISNCVADYSVLYNSASFSTFKCYGVSPTKLNDLCFTNVYADSFVIRGDEVRQIAPGQTGNIADYNYKLPDDFTGCVIAWNSNNLDSKVGGNYNYLYRLFRKSNLKPFERDISTEIYQAGSTPCNGVKGFNCYFPLQSYGFQPTYGVGYQPYRVVVLSFELLHAPATVCGPKKSTNLVKNKGSGGGGSGGGGSNITNLCPFGEVFNATRFASVYAWNRKRISNCVADYSVLYNSASFSTFKCYGVSPTKLNDLCFTNVYADSFVIRGDEVRQIAPGQTGNIADYNYKLPDDFTGCVIAWNSNNLDSKVGGNYNYLYRLFRKSNLKPFERDISTEIYQAGSTPCNGVKGFNCYFPLQSYGFQPTYGVGYQPYRVVVLSFELLHAPATVCGPKKSTNLVKNKGSGGGGDGGGGSGDKTHTCPPCPAPELLGGPSVFLFPPKPKDTLMISRTPEVTCVVVDVSHEDPEVKFNWYVDGVEVHNAKTKPREEQYNSTYRVVSVLTVLHQDWLNGKEYKCKVSNKALPAPIEKTISKAKGQPREPQVYTLPPSREELTKNQVSLTCLVKGFYPSDIAVEWESNGQPENNYKTTPPVLDSDGSFFLYSKLTVDKSRWQQGNVFSCSVMHEALHNHYTQKSLSLSPGS

SEQ ID NO: 1964 - protein, 666 aa, synthetic construct
NITNLCPFGEVFNATRFASVYAWNRKRISNCVADYSVLYNSASFSTFKCYGVSPTKLNDLCFTNVYADSFVIRGDEVRQIAPGQTGTIADYNYKLPDDFTGCVIAWNSNNLDSKVGGNYNYLYRLFRKSNLKPFERDISTEIYQAGSTPCNGVKGFNCYFPLQSYGFQPTYGVGYQPYRVVVLSFELLHAPATVCGPKKSTNLVKNKGSGGGGSGGGGSNITNLCPFGEVFNATRFASVYAWNRKRISNCVADYSVLYNSASFSTFKCYGVSPTKLNDLCFTNVYADSFVIRGDEVRQIAPGQTGTIADYNYKLPDDFTGCVIAWNSNNLDSKVGGNYNYLYRLFRKSNLKPFERDISTEIYQAGSTPCNGVKGFNCYFPLQSYGFQPTYGVGYQPYRVVVLSFELLHAPATVCGPKKSTNLVKNKGSGGGGDGGGGSGDKTHTCPPCPAPELLGGPSVFLFPPKPKDTLMISRTPEVTCVVVDVSHEDPEVKFNWYVDGVEVHNAKTKPREEQYNSTYRVVSVLTVLHQDWLNGKEYKCKVSNKALPAPIEKTISKAKGQPREPQVYTLPPSREELTKNQVSLTCLVKGFYPSDIAVEWESNGQPENNYKTTPPVLDSDGSFFLYSKLTVDKSRWQQGNVFSCSVMHEALHNHYTQKSLSLSPGS

SEQ ID NO: 1965 - protein, 666 aa, synthetic construct
NITNLCPFGEVFNATRFASVYAWNRKRISNCVADYSVLYNSASFSTFKCYGVSPTKLNDLCFTNVYADSFVIRGDEVRQIAPGQTGKIADYNYKLPDDFTGCVIAWNSNNLDSKVGGNYNYRYRLFRKSNLKPFERDISTEIYQAGSKPCNGVEGFNCYFPLQSYGFQPTNGVGYQPYRVVVLSFELLHAPATVCGPKKSTNLVKNKGSGGGGSGGGGSNITNLCPFGEVFNATRFASVYAWNRKRISNCVADYSVLYNSASFSTFKCYGVSPTKLNDLCFTNVYADSFVIRGDEVRQIAPGQTGKIADYNYKLPDDFTGCVIAWNSNNLDSKVGGNYNYRYRLFRKSNLKPFERDISTEIYQAGSKPCNGVEGFNCYFPLQSYGFQPTNGVGYQPYRVVVLSFELLHAPATVCGPKKSTNLVKNKGSGGGGDGGGGSGDKTHTCPPCPAPELLGGPSVFLFPPKPKDTLMISRTPEVTCVVVDVSHEDPEVKFNWYVDGVEVHNAKTKPREEQYNSTYRVVSVLTVLHQDWLNGKEYKCKVSNKALPAPIEKTISKAKGQPREPQVYTLPPSREELTKNQVSLTCLVKGFYPSDIAVEWESNGQPENNYKTTPPVLDSDGSFFLYSKLTVDKSRWQQGNVFSCSVMHEALHNHYTQKSLSLSPGS

SEQ ID NO: 1966 - protein, 666 aa, synthetic construct
NITNLCPFGEVFNATRFASVYAWNRKRISNCVADYSVLYNSASFSTFKCYGVSPTKLNDLCFTNVYADSFVIRGDEVRQIAPGQTGNIADYNYKLPDDFTGCVIAWNSNNLDSKVGGNYNYRYRLFRKSNLKPFERDISTEIYQAGSKPCNGVEGFNCYFPLQSYGFQPTNGVGYQPYRVVVLSFELLHAPATVCGPKKSTNLVKNKGSGGGGSGGGGSNITNLCPFGEVFNATRFASVYAWNRKRISNCVADYSVLYNSASFSTFKCYGVSPTKLNDLCFTNVYADSFVIRGDEVRQIAPGQTGNIADYNYKLPDDFTGCVIAWNSNNLDSKVGGNYNYRYRLFRKSNLKPFERDISTEIYQAGSKPCNGVEGFNCYFPLQSYGFQPTNGVGYQPYRVVVLSFELLHAPATVCGPKKSTNLVKNKGSGGGGDGGGGSGDKTHTCPPCPAPELLGGPSVFLFPPKPKDTLMISRTPEVTCVVVDVSHEDPEVKFNWYVDGVEVHNAKTKPREEQYNSTYRVVSVLTVLHQDWLNGKEYKCKVSNKALPAPIEKTISKAKGQPREPQVYTLPPSREELTKNQVSLTCLVKGFYPSDIAVEWESNGQPENNYKTTPPVLDSDGSFFLYSKLTVDKSRWQQGNVFSCSVMHEALHNHYTQKSLSLSPGS

SEQ ID NO: 1967 - protein, 666 aa, synthetic construct
NITNLCPFGEVFNATKFASVYAWNRKRISNCVADYSVLYNSASFSTFKCYGVSPTKLNDLCFTNVYADSFVIRGDEVRQIAPGQTGKIADYNYKLPDDFTGCVIAWNSNNLDSKVGGNYNYLYRLFRKSNLKPFERDISTEIYQAGSTPCNGVKGFNCYFPLQSYGFQPTYGVGYQPYRVVVLSFELLHAPATVCGPKKSTNLVKNKGSGGGGSGGGGSNITNLCPFGEVFNATKFASVYAWNRKRISNCVADYSVLYNSASFSTFKCYGVSPTKLNDLCFTNVYADSFVIRGDEVRQIAPGQTGKIADYNYKLPDDFTGCVIAWNSNNLDSKVGGNYNYLYRLFRKSNLKPFERDISTEIYQAGSTPCNGVKGFNCYFPLQSYGFQPTYGVGYQPYRVVVLSFELLHAPATVCGPKKSTNLVKNKGSGGGGDGGGGSGDKTHTCPPCPAPELLGGPSVFLFPPKPKDTLMISRTPEVTCVVVDVSHEDPEVKFNWYVDGVEVHNAKTKPREEQYNSTYRVVSVLTVLHQDWLNGKEYKCKVSNKALPAPIEKTISKAKGQPREPQVYTLPPSREELTKNQVSLTCLVKGFYPSDIAVEWESNGQPENNYKTTPPVLDSDGSFFLYSKLTVDKSRWQQGNVFSCSVMHEALHNHYTQKSLSLSPGS

SEQ ID NO: 1968 - protein, 666 aa, synthetic construct
NITNLCPFGEVFNATKFASVYAWNRKRISNCVADYSVLYNSASFSTFKCYGVSPTKLNDLCFTNVYADSFVIRGDEVRQIAPGQTGKIADYNYKLPDDFTGCVIAWNSNNLDSKVGGNYNYLYRLFRKSNLKPFERDISTEIYQAGSRPCNGVKGFNCYFPLQSYGFQPTNGVGYQPYRVVVLSFELLHAPATVCGPKKSTNLVKNKGSGGGGSGGGGSNITNLCPFGEVFNATKFASVYAWNRKRISNCVADYSVLYNSASFSTFKCYGVSPTKLNDLCFTNVYADSFVIRGDEVRQIAPGQTGKIADYNYKLPDDFTGCVIAWNSNNLDSKVGGNYNYLYRLFRKSNLKPFERDISTEIYQAGSRPCNGVKGFNCYFPLQSYGFQPTNGVGYQPYRVVVLSFELLHAPATVCGPKKSTNLVKNKGSGGGGDGGGGSGDKTHTCPPCPAPELLGGPSVFLFPPKPKDTLMISRTPEVTCVVVDVSHEDPEVKFNWYVDGVEVHNAKTKPREEQYNSTYRVVSVLTVLHQDWLNGKEYKCKVSNKALPAPIEKTISKAKGQPREPQVYTLPPSREELTKNQVSLTCLVKGFYPSDIAVEWESNGQPENNYKTTPPVLDSDGSFFLYSKLTVDKSRWQQGNVFSCSVMHEALHNHYTQKSLSLSPGS

SEQ ID NO: 1969 - protein, 666 aa, synthetic construct
NITNLCPFGEVFNATKFASVYAWNRKRISNCVADYSVLYNSASFSTFKCYGVSPTKLNDLCFTNVYADSFVIRGDEVRQIAPGQTGNIADYNYKLPDDFTGCVIAWNSNNLDSKVGGNYNYRYRLFRKSNLKPFERDISTEIYQAGSKPCNGVKGFNCYFPLQSYGFQPTYGVGYQPYRVVVLSFELLHAPATVCGPKKSTNLVKNKGSGGGGSGGGGSNITNLCPFGEVFNATKFASVYAWNRKRISNCVADYSVLYNSASFSTFKCYGVSPTKLNDLCFTNVYADSFVIRGDEVRQIAPGQTGNIADYNYKLPDDFTGCVIAWNSNNLDSKVGGNYNYRYRLFRKSNLKPFERDISTEIYQAGSKPCNGVKGFNCYFPLQSYGFQPTYGVGYQPYRVVVLSFELLHAPATVCGPKKSTNLVKNKGSGGGGDGGGGSGDKTHTCPPCPAPELLGGPSVFLFPPKPKDTLMISRTPEVTCVVVDVSHEDPEVKFNWYVDGVEVHNAKTKPREEQYNSTYRVVSVLTVLHQDWLNGKEYKCKVSNKALPAPIEKTISKAKGQPREPQVYTLPPSREELTKNQVSLTCLVKGFYPSDIAVEWESNGQPENNYKTTPPVLDSDGSFFLYSKLTVDKSRWQQGNVFSCSVMHEALHNHYTQKSLSLSPGS

SEQ ID NO: 1970 - protein, 666 aa, synthetic construct
NITNLCPFGEVFNATKFASVYAWNRKRISNCVADYSVLYNSASFSTFKCYGVSPTKLNDLCFTNVYADSFVIRGDEVRQIAPGQTGNIADYNYKLPDDFTGCVIAWNSNNLDSKVGGNYNYRYRLFRKSNLKPFERDISTEIYQAGSRPCNGVKGFNCYFPLQSYGFQPTYGVGYQPYRVVVLSFELLHAPATVCGPKKSTNLVKNKGSGGGGSGGGGSNITNLCPFGEVFNATKFASVYAWNRKRISNCVADYSVLYNSASFSTFKCYGVSPTKLNDLCFTNVYADSFVIRGDEVRQIAPGQTGNIADYNYKLPDDFTGCVIAWNSNNLDSKVGGNYNYRYRLFRKSNLKPFERDISTEIYQAGSRPCNGVKGFNCYFPLQSYGFQPTYGVGYQPYRVVVLSFELLHAPATVCGPKKSTNLVKNKGSGGGGDGGGGSGDKTHTCPPCPAPELLGGPSVFLFPPKPKDTLMISRTPEVTCVVVDVSHEDPEVKFNWYVDGVEVHNAKTKPREEQYNSTYRVVSVLTVLHQDWLNGKEYKCKVSNKALPAPIEKTISKAKGQPREPQVYTLPPSREELTKNQVSLTCLVKGFYPSDIAVEWESNGQPENNYKTTPPVLDSDGSFFLYSKLTVDKSRWQQGNVFSCSVMHEALHNHYTQKSLSLSPGS

SEQ ID NO: 1971 - protein, 666 aa, synthetic construct
NITNLCPFDEVFNATRFASVYAWNRKRISNCVADYSVLYNLAPFFTFKCYGVSPTKLNDLCFTNVYADSFVIRGDEVRQIAPGQTGNIADYNYKLPDDFTGCVIAWNSNKLDSKVSGNYNYLYRLFRKSNLKPFERDISTEIYQAGNKPCNGVAGFNCYFPLKSYSFRPTYGVGHQPYRVVVLSFELLHAPATVCGPKKSTNLVKNKGSGGGGSGGGGSNITNLCPFDEVFNATRFASVYAWNRKRISNCVADYSVLYNLAPFFTFKCYGVSPTKLNDLCFTNVYADSFVIRGDEVRQIAPGQTGNIADYNYKLPDDFTGCVIAWNSNKLDSKVSGNYNYLYRLFRKSNLKPFERDISTEIYQAGNKPCNGVAGFNCYFPLKSYSFRPTYGVGHQPYRVVVLSFELLHAPATVCGPKKSTNLVKNKGSGGGGDGGGGSGDKTHTCPPCPAPELLGGPSVFLFPPKPKDTLMISRTPEVTCVVVDVSHEDPEVKFNWYVDGVEVHNAKTKPREEQYNSTYRVVSVLTVLHQDWLNGKEYKCKVSNKALPAPIEKTISKAKGQPREPQVYTLPPSREELTKNQVSLTCLVKGFYPSDIAVEWESNGQPENNYKTTPPVLDSDGSFFLYSKLTVDKSRWQQGNVFSCSVMHEALHNHYTQKSLSLSPGS

SEQ ID NO: 1972 - protein, 666 aa, synthetic construct
NITNLCPFDEVFNATRFASVYAWNRKRISNCVADYSVLYNLAPFFTFKCYGVSPTKLNDLCFTNVYADSFVIRGDEVRQIAPGQTGNIADYNYKLPDDFTGCVIAWNSNKLDSKVSGNYNYLYRLFRKSNLKPFERDISTEIYQAGNKPCNGVAGFNCYFPLRSYSFRPTYGVGHQPYRVVVLSFELLHAPATVCGPKKSTNLVKNKGSGGGGSGGGGSNITNLCPFDEVFNATRFASVYAWNRKRISNCVADYSVLYNLAPFFTFKCYGVSPTKLNDLCFTNVYADSFVIRGDEVRQIAPGQTGNIADYNYKLPDDFTGCVIAWNSNKLDSKVSGNYNYLYRLFRKSNLKPFERDISTEIYQAGNKPCNGVAGFNCYFPLRSYSFRPTYGVGHQPYRVVVLSFELLHAPATVCGPKKSTNLVKNKGSGGGGDGGGGSGDKTHTCPPCPAPELLGGPSVFLFPPKPKDTLMISRTPEVTCVVVDVSHEDPEVKFNWYVDGVEVHNAKTKPREEQYNSTYRVVSVLTVLHQDWLNGKEYKCKVSNKALPAPIEKTISKAKGQPREPQVYTLPPSREELTKNQVSLTCLVKGFYPSDIAVEWESNGQPENNYKTTPPVLDSDGSFFLYSKLTVDKSRWQQGNVFSCSVMHEALHNHYTQKSLSLSPGS

SEQ ID NO: 1973 - protein, 666 aa, synthetic construct
NITNLCPFDEVFNATKFASVYAWNRKRISNCVADYSVLYNLAPFFTFKCYGVSPTKLNDLCFTNVYADSFVIRGDEVRQIAPGQTGNIADYNYKLPDDFTGCVIAWNSNKLDSKVSGNYNYRYRLFRKSNLKPFERDISTEIYQAGNKPCNGVKGFNCYFPLRSYSFRPTYGVGHQPYRVVVLSFELLHAPATVCGPKKSTNLVKNKGSGGGGSGGGGSNITNLCPFDEVFNATKFASVYAWNRKRISNCVADYSVLYNLAPFFTFKCYGVSPTKLNDLCFTNVYADSFVIRGDEVRQIAPGQTGNIADYNYKLPDDFTGCVIAWNSNKLDSKVSGNYNYRYRLFRKSNLKPFERDISTEIYQAGNKPCNGVKGFNCYFPLRSYSFRPTYGVGHQPYRVVVLSFELLHAPATVCGPKKSTNLVKNKGSGGGGDGGGGSGDKTHTCPPCPAPELLGGPSVFLFPPKPKDTLMISRTPEVTCVVVDVSHEDPEVKFNWYVDGVEVHNAKTKPREEQYNSTYRVVSVLTVLHQDWLNGKEYKCKVSNKALPAPIEKTISKAKGQPREPQVYTLPPSREELTKNQVSLTCLVKGFYPSDIAVEWESNGQPENNYKTTPPVLDSDGSFFLYSKLTVDKSRWQQGNVFSCSVMHEALHNHYTQKSLSLSPGS

SEQ ID NO: 1974 - protein, 666 aa, synthetic construct
NITNLCPFDEVFNATKFASVYAWNRKRISNCVADYSVLYNLAPFFTFKCYGVSPTKLNDLCFTNVYADSFVIRGDEVRQIAPGQTGNIADYNYKLPDDFTGCVIAWNSNKLDSKVSGNYNYRYRLFRKSNLKPFERDISTEIYQAGNKPCNGVAGFNCYFPLRSYSFRPTYGVGHQPYRVVVLSFELLHAPATVCGPKKSTNLVKNKGSGGGGSGGGGSNITNLCPFDEVFNATKFASVYAWNRKRISNCVADYSVLYNLAPFFTFKCYGVSPTKLNDLCFTNVYADSFVIRGDEVRQIAPGQTGNIADYNYKLPDDFTGCVIAWNSNKLDSKVSGNYNYRYRLFRKSNLKPFERDISTEIYQAGNKPCNGVAGFNCYFPLRSYSFRPTYGVGHQPYRVVVLSFELLHAPATVCGPKKSTNLVKNKGSGGGGDGGGGSGDKTHTCPPCPAPELLGGPSVFLFPPKPKDTLMISRTPEVTCVVVDVSHEDPEVKFNWYVDGVEVHNAKTKPREEQYNSTYRVVSVLTVLHQDWLNGKEYKCKVSNKALPAPIEKTISKAKGQPREPQVYTLPPSREELTKNQVSLTCLVKGFYPSDIAVEWESNGQPENNYKTTPPVLDSDGSFFLYSKLTVDKSRWQQGNVFSCSVMHEALHNHYTQKSLSLSPGS

SEQ ID NO: 1975 - protein, 666 aa, synthetic construct
NITNLCPFDEVFNATKFASVYAWNRKRISNCVADYSVLYNLAPFFTFKCYGVSPTKLNDLCFTNVYADSFVIRGDEVRQIAPGQTGNIADYNYKLPDDFTGCVIAWNSNKLDSKVSGNYNYRYRLFRKSNLKPFERDISTEIYQAGNRPCNGVAGFNCYFPLRSYSFRPTYGVGHQPYRVVVLSFELLHAPATVCGPKKSTNLVKNKGSGGGGSGGGGSNITNLCPFDEVFNATKFASVYAWNRKRISNCVADYSVLYNLAPFFTFKCYGVSPTKLNDLCFTNVYADSFVIRGDEVRQIAPGQTGNIADYNYKLPDDFTGCVIAWNSNKLDSKVSGNYNYRYRLFRKSNLKPFERDISTEIYQAGNRPCNGVAGFNCYFPLRSYSFRPTYGVGHQPYRVVVLSFELLHAPATVCGPKKSTNLVKNKGSGGGGDGGGGSGDKTHTCPPCPAPELLGGPSVFLFPPKPKDTLMISRTPEVTCVVVDVSHEDPEVKFNWYVDGVEVHNAKTKPREEQYNSTYRVVSVLTVLHQDWLNGKEYKCKVSNKALPAPIEKTISKAKGQPREPQVYTLPPSREELTKNQVSLTCLVKGFYPSDIAVEWESNGQPENNYKTTPPVLDSDGSFFLYSKLTVDKSRWQQGNVFSCSVMHEALHNHYTQKSLSLSPGS

SEQ ID NO: 1976 - protein, 666 aa, synthetic construct
NITNLCPFDEVFNATKFASVYAWNRKRISNCVADYSVLYNLAPFFTFKCYGVSPTKLNDLCFTNVYADSFVIRGDEVRQIAPGQTGNIADYNYKLPDDFTGCVIAWNSNKLDSKVSGNYNYRYRLFRKSNLKPFERDISTEIYQAGNRPCNGVKGFNCYFPLRSYSFRPTYGVGHQPYRVVVLSFELLHAPATVCGPKKSTNLVKNKGSGGGGSGGGGSNITNLCPFDEVFNATKFASVYAWNRKRISNCVADYSVLYNLAPFFTFKCYGVSPTKLNDLCFTNVYADSFVIRGDEVRQIAPGQTGNIADYNYKLPDDFTGCVIAWNSNKLDSKVSGNYNYRYRLFRKSNLKPFERDISTEIYQAGNRPCNGVKGFNCYFPLRSYSFRPTYGVGHQPYRVVVLSFELLHAPATVCGPKKSTNLVKNKGSGGGGDGGGGSGDKTHTCPPCPAPELLGGPSVFLFPPKPKDTLMISRTPEVTCVVVDVSHEDPEVKFNWYVDGVEVHNAKTKPREEQYNSTYRVVSVLTVLHQDWLNGKEYKCKVSNKALPAPIEKTISKAKGQPREPQVYTLPPSREELTKNQVSLTCLVKGFYPSDIAVEWESNGQPENNYKTTPPVLDSDGSFFLYSKLTVDKSRWQQGNVFSCSVMHEALHNHYTQKSLSLSPGS

SEQ ID NO: 1977 - DNA, 621 bp, synthetic construct
  source 1..621: mol_type = other DNA
aatatcactaatctttgccccttcggggaagtatttaacgctactcgatttgctagcgtatatgcctggaaccggaagagaataagcaactgtgttgcagactatagcgtgctttacaattccgcatcctttagtaccttcaaatgttacggtgtgagccccaccaaactcaatgatctctgtttcacaaacgtgtacgcagatagtttcgttatacgcggggacgaagtacggcagatagcccctggccagacaggaaacatagccgattacaactacaaacttccagacgattttacagggtgtgtgatcgcttggaattcaaataacctggactccaaagtgggaggcaactataattacctgtaccgactgttccgcaaaagcaacttgaaacctttcgagcgagatatatcaaccgaaatctaccaagctggttctacaccttgtaatggtgtgaagggatttaactgctacttccctcttcagtcctatggatttcagcctacatacggagtcgggtatcaaccctatagagtcgtggtgttgtcatttgaacttctccatgcacctgctactgtctgtggtccaaaaaagtccactaatcttgtaaaaaacaaa

SEQ ID NO: 1978 - DNA, 621 bp, synthetic construct
  source 1..621: mol_type = other DNA
aatatcactaatctttgccccttcggggaagtatttaacgctactcgatttgctagcgtatatgcctggaaccggaagagaataagcaactgtgttgcagactatagcgtgctttacaattccgcatcctttagtaccttcaaatgttacggtgtgagccccaccaaactcaatgatctctgtttcacaaacgtgtacgcagatagtttcgttatacgcggggacgaagtacggcagatagcccctggccagacaggaaccatagccgattacaactacaaacttccagacgattttacagggtgtgtgatcgcttggaattcaaataacctggactccaaagtgggaggcaactataattacctgtaccgactgttccgcaaaagcaacttgaaacctttcgagcgagatatatcaaccgaaatctaccaagctggttctacaccttgtaatggtgtgaagggatttaactgctacttccctcttcagtcctatggatttcagcctacatacggagtcgggtatcaaccctatagagtcgtggtgttgtcatttgaacttctccatgcacctgctactgtctgtggtccaaaaaagtccactaatcttgtaaaaaacaaa

SEQ ID NO: 1979 - DNA, 621 bp, synthetic construct
  source 1..621: mol_type = other DNA
aatatcactaatctttgccccttcggggaagtatttaacgctactcgatttgctagcgtatatgcctggaaccggaagagaataagcaactgtgttgcagactatagcgtgctttacaattccgcatcctttagtaccttcaaatgttacggtgtgagccccaccaaactcaatgatctctgtttcacaaacgtgtacgcagatagtttcgttatacgcggggacgaagtacggcagatagcccctggccagacaggaaccatagccgattacaactacaaacttccagacgattttacagggtgtgtgatcgcttggaattcaaataacctggactccaaagtgggaggcaactataattacagataccgactgttccgcaaaagcaacttgaaacctttcgagcgagatatatcaaccgaaatctaccaagctggttctacaccttgtaatggtgtgaagggatttaactgctacttccctcttcagtcctatggatttcagcctacatacggagtcgggtatcaaccctatagagtcgtggtgttgtcatttgaacttctccatgcacctgctactgtctgtggtccaaaaaagtccactaatcttgtaaaaaacaaa

SEQ ID NO: 1980 - DNA, 621 bp, synthetic construct
  source 1..621: mol_type = other DNA
aatatcactaatctttgccccttcggggaagtatttaacgctactcgatttgctagcgtatatgcctggaaccggaagagaataagcaactgtgttgcagactatagcgtgctttacaattccgcatcctttagtaccttcaaatgttacggtgtgagccccaccaaactcaatgatctctgtttcacaaacgtgtacgcagatagtttcgttatacgcggggacgaagtacggcagatagcccctggccagacaggaaagatagccgattacaactacaaacttccagacgattttacagggtgtgtgatcgcttggaattcaaataacctggactccaaagtgggaggcaactataattacagataccgactgttccgcaaaagcaacttgaaacctttcgagcgagatatatcaaccgaaatctaccaagctggttctaaaccttgtaatggtgtggagggatttaactgctacttccctcttcagtcctatggatttcagcctacaaatggagtcgggtatcaaccctatagagtcgtggtgttgtcatttgaacttctccatgcacctgctactgtctgtggtccaaaaaagtccactaatcttgtaaaaaacaaa

SEQ ID NO: 1981 - DNA, 621 bp, synthetic construct
  source 1..621: mol_type = other DNA
aatatcactaatctttgccccttcggggaagtatttaacgctactcgatttgctagcgtatatgcctggaaccggaagagaataagcaactgtgttgcagactatagcgtgctttacaattccgcatcctttagtaccttcaaatgttacggtgtgagccccaccaaactcaatgatctctgtttcacaaacgtgtacgcagatagtttcgttatacgcggggacgaagtacggcagatagcccctggccagacaggaaacatagccgattacaactacaaacttccagacgattttacagggtgtgtgatcgcttggaattcaaataacctggactccaaagtgggaggcaactataattacagataccgactgttccgcaaaagcaacttgaaacctttcgagcgagatatatcaaccgaaatctaccaagctggttctaaaccttgtaatggtgtggagggatttaactgctacttccctcttcagtcctatggatttcagcctacaaatggagtcgggtatcaaccctatagagtcgtggtgttgtcatttgaacttctccatgcacctgctactgtctgtggtccaaaaaagtccactaatcttgtaaaaaacaaa

SEQ ID NO: 1982 - DNA, 621 bp, synthetic construct
  source 1..621: mol_type = other DNA
aatatcactaatctttgccccttcggggaagtatttaacgctactaaatttgctagcgtatatgcctggaaccggaagagaataagcaactgtgttgcagactatagcgtgctttacaattccgcatcctttagtaccttcaaatgttacggtgtgagccccaccaaactcaatgatctctgtttcacaaacgtgtacgcagatagtttcgttatacgcggggacgaagtacggcagatagcccctggccagacaggaaagatagccgattacaactacaaacttccagacgattttacagggtgtgtgatcgcttggaattcaaataacctggactccaaagtgggaggcaactataattacctgtaccgactgttccgcaaaagcaacttgaaacctttcgagcgagatatatcaaccgaaatctaccaagctggttctacaccttgtaatggtgtgaagggatttaactgctacttccctcttcagtcctatggatttcagcctacatacggagtcgggtatcaaccctatagagtcgtggtgttgtcatttgaacttctccatgcacctgctactgtctgtggtccaaaaaagtccactaatcttgtaaaaaacaaa

SEQ ID NO: 1983 - DNA, 621 bp, synthetic construct
  source 1..621: mol_type = other DNA
aatatcactaatctttgccccttcggggaagtatttaacgctactaaatttgctagcgtatatgcctggaaccggaagagaataagcaactgtgttgcagactatagcgtgctttacaattccgcatcctttagtaccttcaaatgttacggtgtgagccccaccaaactcaatgatctctgtttcacaaacgtgtacgcagatagtttcgttatacgcggggacgaagtacggcagatagcccctggccagacaggaaagatagccgattacaactacaaacttccagacgattttacagggtgtgtgatcgcttggaattcaaataacctggactccaaagtgggaggcaactataattacctgtaccgactgttccgcaaaagcaacttgaaacctttcgagcgagatatatcaaccgaaatctaccaagctggttctagaccttgtaatggtgtgaagggatttaactgctacttccctcttcagtcctatggatttcagcctacaaatggagtcgggtatcaaccctatagagtcgtggtgttgtcatttgaacttctccatgcacctgctactgtctgtggtccaaaaaagtccactaatcttgtaaaaaacaaa

SEQ ID NO: 1984 - DNA, 621 bp, synthetic construct
  source 1..621: mol_type = other DNA
aatatcactaatctttgccccttcggggaagtatttaacgctactaaatttgctagcgtatatgcctggaaccggaagagaataagcaactgtgttgcagactatagcgtgctttacaattccgcatcctttagtaccttcaaatgttacggtgtgagccccaccaaactcaatgatctctgtttcacaaacgtgtacgcagatagtttcgttatacgcggggacgaagtacggcagatagcccctggccagacaggaaacatagccgattacaactacaaacttccagacgattttacagggtgtgtgatcgcttggaattcaaataacctggactccaaagtgggaggcaactataattacagataccgactgttccgcaaaagcaacttgaaacctttcgagcgagatatatcaaccgaaatctaccaagctggttctaaaccttgtaatggtgtgaagggatttaactgctacttccctcttcagtcctatggatttcagcctacatacggagtcgggtatcaaccctatagagtcgtggtgttgtcatttgaacttctccatgcacctgctactgtctgtggtccaaaaaagtccactaatcttgtaaaaaacaaa

SEQ ID NO: 1985 - DNA, 621 bp, synthetic construct
  source 1..621: mol_type = other DNA
aatatcactaatctttgccccttcggggaagtatttaacgctactaaatttgctagcgtatatgcctggaaccggaagagaataagcaactgtgttgcagactatagcgtgctttacaattccgcatcctttagtaccttcaaatgttacggtgtgagccccaccaaactcaatgatctctgtttcacaaacgtgtacgcagatagtttcgttatacgcggggacgaagtacggcagatagcccctggccagacaggaaacatagccgattacaactacaaacttccagacgattttacagggtgtgtgatcgcttggaattcaaataacctggactccaaagtgggaggcaactataattacagataccgactgttccgcaaaagcaacttgaaacctttcgagcgagatatatcaaccgaaatctaccaagctggttctagaccttgtaatggtgtgaagggatttaactgctacttccctcttcagtcctatggatttcagcctacatacggagtcgggtatcaaccctatagagtcgtggtgttgtcatttgaacttctccatgcacctgctactgtctgtggtccaaaaaagtccactaatcttgtaaaaaacaaa

SEQ ID NO: 1986 - DNA, 621 bp, synthetic construct
  source 1..621: mol_type = other DNA
aatatcactaatctttgccccttcgatgaagtatttaacgctactcgatttgctagcgtatatgcctggaaccggaagagaataagcaactgtgttgcagactatagcgtgctttacaatcttgctccattctttaccttcaaatgttacggtgtgagccccaccaaactcaatgatctctgtttcacaaacgtgtacgcagatagtttcgttatacgcggggacgaagtacggcagatagcccctggccagacaggaaacatagccgattacaactacaaacttccagacgattttacagggtgtgtgatcgcttggaattcaaaaaacctggactccaaagtgagtggcaactataattacctgtaccgactgttccgcaaaagcaacttgaaacctttcgagcgagatatatcaaccgaaatctaccaagctggtaataaaccttgtaatggtgtggccggatttaactgctacttccctcttaagtcctatagctttaggcctacatacggagtcgggcaccaaccctatagagtcgtggtgttgtcatttgaacttctccatgcacctgctactgtctgtggtccaaaaaagtccactaatcttgtaaaaaacaaa

SEQ ID NO: 1987 - DNA, 621 bp, synthetic construct
  source 1..621: mol_type = other DNA
aatatcactaatctttgccccttcgatgaagtatttaacgctactcgatttgctagcgtatatgcctggaaccggaagagaataagcaactgtgttgcagactatagcgtgctttacaatcttgctccattctttaccttcaaatgttacggtgtgagccccaccaaactcaatgatctctgtttcacaaacgtgtacgcagatagtttcgttatacgcggggacgaagtacggcagatagcccctggccagacaggaaacatagccgattacaactacaaacttccagacgattttacagggtgtgtgatcgcttggaattcaaaaaacctggactccaaagtgagtggcaactataattacctgtaccgactgttccgcaaaagcaacttgaaacctttcgagcgagatatatcaaccgaaatctaccaagctggtaataaaccttgtaatggtgtggccggatttaactgctacttccctcttagatcctatagctttaggcctacatacggagtcgggcaccaaccctatagagtcgtggtgttgtcatttgaacttctccatgcacctgctactgtctgtggtccaaaaaagtccactaatcttgtaaaaaacaaa

SEQ ID NO: 1988 - DNA, 621 bp, synthetic construct
  source 1..621: mol_type = other DNA
aatatcactaatctttgccccttcgatgaagtatttaacgctactaaatttgctagcgtatatgcctggaaccggaagagaataagcaactgtgttgcagactatagcgtgctttacaatcttgctccattctttaccttcaaatgttacggtgtgagccccaccaaactcaatgatctctgtttcacaaacgtgtacgcagatagtttcgttatacgcggggacgaagtacggcagatagcccctggccagacaggaaacatagccgattacaactacaaacttccagacgattttacagggtgtgtgatcgcttggaattcaaaaaacctggactccaaagtgagtggcaactataattacagataccgactgttccgcaaaagcaacttgaaacctttcgagcgagatatatcaaccgaaatctaccaagctggtaataaaccttgtaatggtgtgaagggatttaactgctacttccctcttagatcctatagctttaggcctacatacggagtcgggcaccaaccctatagagtcgtggtgttgtcatttgaacttctccatgcacctgctactgtctgtggtccaaaaaagtccactaatcttgtaaaaaacaaa

SEQ ID NO: 1989 - DNA, 621 bp, synthetic construct
  source 1..621: mol_type = other DNA
aatatcactaatctttgccccttcgatgaagtatttaacgctactaaatttgctagcgtatatgcctggaaccggaagagaataagcaactgtgttgcagactatagcgtgctttacaatcttgctccattctttaccttcaaatgttacggtgtgagccccaccaaactcaatgatctctgtttcacaaacgtgtacgcagatagtttcgttatacgcggggacgaagtacggcagatagcccctggccagacaggaaacatagccgattacaactacaaacttccagacgattttacagggtgtgtgatcgcttggaattcaaaaaacctggactccaaagtgagtggcaactataattacagataccgactgttccgcaaaagcaacttgaaacctttcgagcgagatatatcaaccgaaatctaccaagctggtaataaaccttgtaatggtgtggccggatttaactgctacttccctcttagatcctatagctttaggcctacatacggagtcgggcaccaaccctatagagtcgtggtgttgtcatttgaacttctccatgcacctgctactgtctgtggtccaaaaaagtccactaatcttgtaaaaaacaaa

SEQ ID NO: 1990 - DNA, 621 bp, synthetic construct
  source 1..621: mol_type = other DNA
aatatcactaatctttgccccttcgatgaagtatttaacgctactaaatttgctagcgtatatgcctggaaccggaagagaataagcaactgtgttgcagactatagcgtgctttacaatcttgctccattctttaccttcaaatgttacggtgtgagccccaccaaactcaatgatctctgtttcacaaacgtgtacgcagatagtttcgttatacgcggggacgaagtacggcagatagcccctggccagacaggaaacatagccgattacaactacaaacttccagacgattttacagggtgtgtgatcgcttggaattcaaaaaacctggactccaaagtgagtggcaactataattacagataccgactgttccgcaaaagcaacttgaaacctttcgagcgagatatatcaaccgaaatctaccaagctggtaatagaccttgtaatggtgtggccggatttaactgctacttccctcttagatcctatagctttaggcctacatacggagtcgggcaccaaccctatagagtcgtggtgttgtcatttgaacttctccatgcacctgctactgtctgtggtccaaaaaagtccactaatcttgtaaaaaacaaa

SEQ ID NO: 1991 - DNA, 621 bp, synthetic construct
  source 1..621: mol_type = other DNA
aatatcactaatctttgccccttcgatgaagtatttaacgctactaaatttgctagcgtatatgcctggaaccggaagagaataagcaactgtgttgcagactatagcgtgctttacaatcttgctccattctttaccttcaaatgttacggtgtgagccccaccaaactcaatgatctctgtttcacaaacgtgtacgcagatagtttcgttatacgcggggacgaagtacggcagatagcccctggccagacaggaaacatagccgattacaactacaaacttccagacgattttacagggtgtgtgatcgcttggaattcaaaaaacctggactccaaagtgagtggcaactataattacagataccgactgttccgcaaaagcaacttgaaacctttcgagcgagatatatcaaccgaaatctaccaagctggtaatagaccttgtaatggtgtgaagggatttaactgctacttccctcttagatcctatagctttaggcctacatacggagtcgggcaccaaccctatagagtcgtggtgttgtcatttgaacttctccatgcacctgctactgtctgtggtccaaaaaagtccactaatcttgtaaaaaacaaa

SEQ ID NO: 1992 - DNA, 1458 bp, synthetic construct
  source 1..1458: mol_type = other DNA
agggtacaaccaactgaaagtatagtccgattccccaatattactaacctttgccctttcggtgaggtattcaatgccacccgtttcgcctccgtctacgcatggaacaggaaaagaatatcaaactgcgtagctgactacagcgtcctttataatagcgcatctttctcaactttcaaatgctatggggtgagcccaactaaacttaacgatctgtgttttaccaatgtatacgctgactcatttgttattagaggcgatgaagttagacaaattgctcctggccagacaggcaagattgcagattataattataaactgccagatgattttactgggtgcgttatagcctggaattccaacaacctggatagtaaagtcggcgggaattataattatctttacaggctgtttcgcaagtctaacctgaagccttttgaaagggatatttctacagagatctatcaagctggctctaccccttgtaacggggttgaaggatttaattgctatttcccactccagtcatacggttttcagccaactaacggcgtaggataccagccctatcgggtggttgtcctgtccttcgagctcttgcacgccccagcaactgtatgtggtcccaaaaagagcaccaacttggtcaaaaataaatgcgtcaattttaatttcaatggtctcaccggtactggggttctgacagaatccggatctggtggggggggcagcggagggggcggaagtcgagttcagccaaccgagagcattgtacgcttccccaacattaccaatctttgtccatttggtgaggtgtttaatgctactcgattcgctagcgtctacgcttggaaccgcaaaaggatatctaactgcgtagccgattactctgtattgtacaattctgcatcatttagcacttttaaatgttatggagtgtcaccaactaaacttaacgacctttgcttcacaaatgtttacgctgattcttttgttattcggggtgacgaggttcggcaaatagccccaggacagactggcaaaatcgccgattacaattacaaactccccgacgactttaccggctgcgtcatagcctggaactctaacaacctggatagcaaagtaggagggaactataattacctctatcgcttgtttcgcaaatccaacctgaagccctttgaacgtgacatttccaccgagatatatcaagctggctccacaccttgtaacggagtagaggggtttaactgttacttccccttgcaatcctacggttttcaacccactaacggcgtaggataccaaccttatagagtcgttgtgctttcctttgaactccttcatgcaccagctacagtgtgtggaccaaagaaaagcacaaacctcgttaaaaacaaatgcgtaaatttcaactttaatgggctgactggaacaggggtcttgactgagtct

SEQ ID NO: 1993 - DNA, 1278 bp, synthetic construct
  source 1..1278: mol_type = other DNA
aatatcacaaacttgtgcccatttggggaggtcttcaatgccactcggtttgcatcagtatatgcatggaatcgtaaacggatatcaaattgcgttgctgactattcagtcctctataatagtgctagtttcagtacatttaaatgctacggagtatctcctactaagttgaatgacctttgcttcacaaatgtctatgctgacagttttgttattaggggtgacgaggtgcggcagattgcacccgggcaaacaggaaacatcgctgactacaattacaaacttcctgatgacttcactggttgtgtgattgcttggaattccaacaatctggattccaaagtgggtgggaattacaattacttgtatagattgtttagaaaatctaacctcaagccattcgaacgggatataagcacagaaatctatcaggctgggagcacaccttgtaacggcgtaaaggggttcaattgctattttccacttcagtcatacggctttcaacccacctacggggtgggataccagccatatcgagtggtcgtactctctttcgagctgcttcatgcccccgcaaccgtgtgtggtcccaaaaaaagcaccaatctcgtcaagaataagggatcaggggggggcggatcaggcggtggaggcagcaacataactaatctttgtccattcggtgaagtctttaatgcaacccgttttgcttctgtgtatgcatggaacaggaaaagaatatccaattgcgttgccgactatagcgtcctttacaattctgcctcctttagcacatttaagtgttatggggtctcccccactaagctgaatgatctgtgtttcaccaacgtttatgcagactcctttgttatacggggggatgaagttcgacaaatagcacccgggcagacagggaacatcgctgactacaattacaagcttccagatgacttcactgggtgcgtaatcgcctggaacagtaacaacttggactctaaagtcggagggaattataattacctttatcgtctcttccgcaaaagtaacttgaagccttttgagagggacatttccacagagatatatcaagcaggttccacaccatgcaacggcgtcaagggatttaattgttatttccccctccaatcatacggctttcagccaacttacggcgttggctaccaaccatacagagtcgtagtgctttcctttgaactgctgcacgcccctgccactgtgtgtggcccaaaaaagagcaccaatttggtaaagaacaag

SEQ ID NO: 1994 - DNA, 1278 bp, synthetic construct
  source 1..1278: mol_type = other DNA
aatatcacaaacttgtgcccatttggggaggtcttcaatgccactcggtttgcatcagtatatgcatggaatcgtaaacggatatcaaattgcgttgctgactattcagtcctctataatagtgctagtttcagtacatttaaatgctacggagtatctcctactaagttgaatgacctttgcttcacaaatgtctatgctgacagttttgttattaggggtgacgaggtgcggcagattgcacccgggcaaacaggaaccatcgctgactacaattacaaacttcctgatgacttcactggttgtgtgattgcttggaattccaacaatctggattccaaagtgggtgggaattacaattacttgtatagattgtttagaaaatctaacctcaagccattcgaacgggatataagcacagaaatctatcaggctgggagcacaccttgtaacggcgtaaaggggttcaattgctattttccacttcagtcatacggctttcaacccacctacggggtgggataccagccatatcgagtggtcgtactctctttcgagctgcttcatgcccccgcaaccgtgtgtggtcccaaaaaaagcaccaatctcgtcaagaataagggatcaggggggggcggatcaggcggtggaggcagcaacataactaatctttgtccattcggtgaagtctttaatgcaacccgttttgcttctgtgtatgcatggaacaggaaaagaatatccaattgcgttgccgactatagcgtcctttacaattctgcctcctttagcacatttaagtgttatggggtctcccccactaagctgaatgatctgtgtttcaccaacgtttatgcagactcctttgttatacggggggatgaagttcgacaaatagcacccgggcagacagggaccatcgctgactacaattacaagcttccagatgacttcactgggtgcgtaatcgcctggaacagtaacaacttggactctaaagtcggagggaattataattacctttatcgtctcttccgcaaaagtaacttgaagccttttgagagggacatttccacagagatatatcaagcaggttccacaccatgcaacggcgtcaagggatttaattgttatttccccctccaatcatacggctttcagccaacttacggcgttggctaccaaccatacagagtcgtagtgctttcctttgaactgctgcacgcccctgccactgtgtgtggcccaaaaaagagcaccaatttggtaaagaacaag

SEQ ID NO: 1995 - DNA, 1278 bp, synthetic construct
  source 1..1278: mol_type = other DNA
aatatcacaaacttgtgcccatttggggaggtcttcaatgccactcggtttgcatcagtatatgcatggaatcgtaaacggatatcaaattgcgttgctgactattcagtcctctataatagtgctagtttcagtacatttaaatgctacggagtatctcctactaagttgaatgacctttgcttcacaaatgtctatgctgacagttttgttattaggggtgacgaggtgcggcagattgcacccgggcaaacaggaaagatcgctgactacaattacaaacttcctgatgacttcactggttgtgtgattgcttggaattccaacaatctggattccaaagtgggtgggaattacaattacagatatagattgtttagaaaatctaacctcaagccattcgaacgggatataagcacagaaatctatcaggctgggagcaaaccttgtaacggcgtagaggggttcaattgctattttccacttcagtcatacggctttcaacccaccaatggggtgggataccagccatatcgagtggtcgtactctctttcgagctgcttcatgcccccgcaaccgtgtgtggtcccaaaaaaagcaccaatctcgtcaagaataagggatcaggggggggcggatcaggcggtggaggcagcaacataactaatctttgtccattcggtgaagtctttaatgcaacccgttttgcttctgtgtatgcatggaacaggaaaagaatatccaattgcgttgccgactatagcgtcctttacaattctgcctcctttagcacatttaagtgttatggggtctcccccactaagctgaatgatctgtgtttcaccaacgtttatgcagactcctttgttatacggggggatgaagttcgacaaatagcacccgggcagacagggaagatcgctgactacaattacaagcttccagatgacttcactgggtgcgtaatcgcctggaacagtaacaacttggactctaaagtcggagggaattataattacagatatcgtctcttccgcaaaagtaacttgaagccttttgagagggacatttccacagagatatatcaagcaggttccaaaccatgcaacggcgtcgagggatttaattgttatttccccctccaatcatacggctttcagccaactaacggcgttggctaccaaccatacagagtcgtagtgctttcctttgaactgctgcacgcccctgccactgtgtgtggcccaaaaaagagcaccaatttggtaaagaacaag

SEQ ID NO: 1996 - DNA, 1278 bp, synthetic construct
  source 1..1278: mol_type = other DNA
aatatcacaaacttgtgcccatttggggaggtcttcaatgccactcggtttgcatcagtatatgcatggaatcgtaaacggatatcaaattgcgttgctgactattcagtcctctataatagtgctagtttcagtacatttaaatgctacggagtatctcctactaagttgaatgacctttgcttcacaaatgtctatgctgacagttttgttattaggggtgacgaggtgcggcagattgcacccgggcaaacaggaaacatcgctgactacaattacaaacttcctgatgacttcactggttgtgtgattgcttggaattccaacaatctggattccaaagtgggtgggaattacaattacagatatagattgtttagaaaatctaacctcaagccattcgaacgggatataagcacagaaatctatcaggctgggagcaaaccttgtaacggcgtagaggggttcaattgctattttccacttcagtcatacggctttcaacccaccaatggggtgggataccagccatatcgagtggtcgtactctctttcgagctgcttcatgcccccgcaaccgtgtgtggtcccaaaaaaagcaccaatctcgtcaagaataagggatcaggggggggcggatcaggcggtggaggcagcaacataactaatctttgtccattcggtgaagtctttaatgcaacccgttttgcttctgtgtatgcatggaacaggaaaagaatatccaattgcgttgccgactatagcgtcctttacaattctgcctcctttagcacatttaagtgttatggggtctcccccactaagctgaatgatctgtgtttcaccaacgtttatgcagactcctttgttatacggggggatgaagttcgacaaatagcacccgggcagacagggaacatcgctgactacaattacaagcttccagatgacttcactgggtgcgtaatcgcctggaacagtaacaacttggactctaaagtcggagggaattataattacagatatcgtctcttccgcaaaagtaacttgaagccttttgagagggacatttccacagagatatatcaagcaggttccaaaccatgcaacggcgtcgagggatttaattgttatttccccctccaatcatacggctttcagccaactaacggcgttggctaccaaccatacagagtcgtagtgctttcctttgaactgctgcacgcccctgccactgtgtgtggcccaaaaaagagcaccaatttggtaaagaacaag

SEQ ID NO: 1997 - DNA, 1278 bp, synthetic construct
  source 1..1278: mol_type = other DNA
aatatcacaaacttgtgcccatttggggaggtcttcaatgccactaaatttgcatcagtatatgcatggaatcgtaaacggatatcaaattgcgttgctgactattcagtcctctataatagtgctagtttcagtacatttaaatgctacggagtatctcctactaagttgaatgacctttgcttcacaaatgtctatgctgacagttttgttattaggggtgacgaggtgcggcagattgcacccgggcaaacaggaaagatcgctgactacaattacaaacttcctgatgacttcactggttgtgtgattgcttggaattccaacaatctggattccaaagtgggtgggaattacaattacttgtatagattgtttagaaaatctaacctcaagccattcgaacgggatataagcacagaaatctatcaggctgggagcacaccttgtaacggcgtaaaggggttcaattgctattttccacttcagtcatacggctttcaacccacctacggggtgggataccagccatatcgagtggtcgtactctctttcgagctgcttcatgcccccgcaaccgtgtgtggtcccaaaaaaagcaccaatctcgtcaagaataagggatcaggggggggcggatcaggcggtggaggcagcaacataactaatctttgtccattcggtgaagtctttaatgcaaccaaatttgcttctgtgtatgcatggaacaggaaaagaatatccaattgcgttgccgactatagcgtcctttacaattctgcctcctttagcacatttaagtgttatggggtctcccccactaagctgaatgatctgtgtttcaccaacgtttatgcagactcctttgttatacggggggatgaagttcgacaaatagcacccgggcagacagggaagatcgctgactacaattacaagcttccagatgacttcactgggtgcgtaatcgcctggaacagtaacaacttggactctaaagtcggagggaattataattacctttatcgtctcttccgcaaaagtaacttgaagccttttgagagggacatttccacagagatatatcaagcaggttccacaccatgcaacggcgtcaagggatttaattgttatttccccctccaatcatacggctttcagccaacttacggcgttggctaccaaccatacagagtcgtagtgctttcctttgaactgctgcacgcccctgccactgtgtgtggcccaaaaaagagcaccaatttggtaaagaacaag

SEQ ID NO: 1998 - DNA, 1278 bp, synthetic construct
  source 1..1278: mol_type = other DNA
aatatcacaaacttgtgcccatttggggaggtcttcaatgccactaaatttgcatcagtatatgcatggaatcgtaaacggatatcaaattgcgttgctgactattcagtcctctataatagtgctagtttcagtacatttaaatgctacggagtatctcctactaagttgaatgacctttgcttcacaaatgtctatgctgacagttttgttattaggggtgacgaggtgcggcagattgcacccgggcaaacaggaaagatcgctgactacaattacaaacttcctgatgacttcactggttgtgtgattgcttggaattccaacaatctggattccaaagtgggtgggaattacaattacttgtatagattgtttagaaaatctaacctcaagccattcgaacgggatataagcacagaaatctatcaggctgggagcagaccttgtaacggcgtaaaggggttcaattgctattttccacttcagtcatacggctttcaacccaccaatggggtgggataccagccatatcgagtggtcgtactctctttcgagctgcttcatgcccccgcaaccgtgtgtggtcccaaaaaaagcaccaatctcgtcaagaataagggatcaggggggggcggatcaggcggtggaggcagcaacataactaatctttgtccattcggtgaagtctttaatgcaaccaaatttgcttctgtgtatgcatggaacaggaaaagaatatccaattgcgttgccgactatagcgtcctttacaattctgcctcctttagcacatttaagtgttatggggtctcccccactaagctgaatgatctgtgtttcaccaacgtttatgcagactcctttgttatacggggggatgaagttcgacaaatagcacccgggcagacagggaagatcgctgactacaattacaagcttccagatgacttcactgggtgcgtaatcgcctggaacagtaacaacttggactctaaagtcggagggaattataattacctttatcgtctcttccgcaaaagtaacttgaagccttttgagagggacatttccacagagatatatcaagcaggttccagaccatgcaacggcgtcaagggatttaattgttatttccccctccaatcatacggctttcagccaactaacggcgttggctaccaaccatacagagtcgtagtgctttcctttgaactgctgcacgcccctgccactgtgtgtggcccaaaaaagagcaccaatttggtaaagaacaag

SEQ ID NO: 1999 - DNA, 1278 bp, synthetic construct
  source 1..1278: mol_type = other DNA
aatatcacaaacttgtgcccatttggggaggtcttcaatgccactaaatttgcatcagtatatgcatggaatcgtaaacggatatcaaattgcgttgctgactattcagtcctctataatagtgctagtttcagtacatttaaatgctacggagtatctcctactaagttgaatgacctttgcttcacaaatgtctatgctgacagttttgttattaggggtgacgaggtgcggcagattgcacccgggcaaacaggaaacatcgctgactacaattacaaacttcctgatgacttcactggttgtgtgattgcttggaattccaacaatctggattccaaagtgggtgggaattacaattacagatatagattgtttagaaaatctaacctcaagccattcgaacgggatataagcacagaaatctatcaggctgggagcaaaccttgtaacggcgtaaaggggttcaattgctattttccacttcagtcatacggctttcaacccacctacggggtgggataccagccatatcgagtggtcgtactctctttcgagctgcttcatgcccccgcaaccgtgtgtggtcccaaaaaaagcaccaatctcgtcaagaataagggatcaggggggggcggatcaggcggtggaggcagcaacataactaatctttgtccattcggtgaagtctttaatgcaaccaaatttgcttctgtgtatgcatggaacaggaaaagaatatccaattgcgttgccgactatagcgtcctttacaattctgcctcctttagcacatttaagtgttatggggtctcccccactaagctgaatgatctgtgtttcaccaacgtttatgcagactcctttgttatacggggggatgaagttcgacaaatagcacccgggcagacagggaacatcgctgactacaattacaagcttccagatgacttcactgggtgcgtaatcgcctggaacagtaacaacttggactctaaagtcggagggaattataattacagatatcgtctcttccgcaaaagtaacttgaagccttttgagagggacatttccacagagatatatcaagcaggttccaaaccatgcaacggcgtcaagggatttaattgttatttccccctccaatcatacggctttcagccaacttacggcgttggctaccaaccatacagagtcgtagtgctttcctttgaactgctgcacgcccctgccactgtgtgtggcccaaaaaagagcaccaatttggtaaagaacaag

SEQ ID NO: 2000 - DNA, 1278 bp, synthetic construct
  source 1..1278: mol_type = other DNA
aatatcacaaacttgtgcccatttggggaggtcttcaatgccactaaatttgcatcagtatatgcatggaatcgtaaacggatatcaaattgcgttgctgactattcagtcctctataatagtgctagtttcagtacatttaaatgctacggagtatctcctactaagttgaatgacctttgcttcacaaatgtctatgctgacagttttgttattaggggtgacgaggtgcggcagattgcacccgggcaaacaggaaacatcgctgactacaattacaaacttcctgatgacttcactggttgtgtgattgcttggaattccaacaatctggattccaaagtgggtgggaattacaattacagatatagattgtttagaaaatctaacctcaagccattcgaacgggatataagcacagaaatctatcaggctgggagcagaccttgtaacggcgtaaaggggttcaattgctattttccacttcagtcatacggctttcaacccacctacggggtgggataccagccatatcgagtggtcgtactctctttcgagctgcttcatgcccccgcaaccgtgtgtggtcccaaaaaaagcaccaatctcgtcaagaataagggatcaggggggggcggatcaggcggtggaggcagcaacataactaatctttgtccattcggtgaagtctttaatgcaaccaaatttgcttctgtgtatgcatggaacaggaaaagaatatccaattgcgttgccgactatagcgtcctttacaattctgcctcctttagcacatttaagtgttatggggtctcccccactaagctgaatgatctgtgtttcaccaacgtttatgcagactcctttgttatacggggggatgaagttcgacaaatagcacccgggcagacagggaacatcgctgactacaattacaagcttccagatgacttcactgggtgcgtaatcgcctggaacagtaacaacttggactctaaagtcggagggaattataattacagatatcgtctcttccgcaaaagtaacttgaagccttttgagagggacatttccacagagatatatcaagcaggttccagaccatgcaacggcgtcaagggatttaattgttatttccccctccaatcatacggctttcagccaacttacggcgttggctaccaaccatacagagtcgtagtgctttcctttgaactgctgcacgcccctgccactgtgtgtggcccaaaaaagagcaccaatttggtaaagaacaag

SEQ ID NO: 2001 - DNA, 1278 bp, synthetic construct
  source 1..1278: mol_type = other DNA
aatatcacaaacttgtgcccatttgatgaggtcttcaatgccactcggtttgcatcagtatatgcatggaatcgtaaacggatatcaaattgcgttgctgactattcagtcctctataatcttgctccattctttacatttaaatgctacggagtatctcctactaagttgaatgacctttgcttcacaaatgtctatgctgacagttttgttattaggggtgacgaggtgcggcagattgcacccgggcaaacaggaaacatcgctgactacaattacaaacttcctgatgacttcactggttgtgtgattgcttggaattccaacaaactggattccaaagtgagtgggaattacaattacttgtatagattgtttagaaaatctaacctcaagccattcgaacgggatataagcacagaaatctatcaggctgggaataaaccttgtaacggcgtagccgggttcaattgctattttccacttaagtcatacagctttaggcccacctacggggtgggacaccagccatatcgagtggtcgtactctctttcgagctgcttcatgcccccgcaaccgtgtgtggtcccaaaaaaagcaccaatctcgtcaagaataagggatcaggggggggcggatcaggcggtggaggcagcaacataactaatctttgtccattcgatgaagtctttaatgcaacccgttttgcttctgtgtatgcatggaacaggaaaagaatatccaattgcgttgccgactatagcgtcctttacaatctcgccccctttttcacatttaagtgttatggggtctcccccactaagctgaatgatctgtgtttcaccaacgtttatgcagactcctttgttatacggggggatgaagttcgacaaatagcacccgggcagacagggaacatcgctgactacaattacaagcttccagatgacttcactgggtgcgtaatcgcctggaacagtaacaaattggactctaaagtctctgggaattataattacctttatcgtctcttccgcaaaagtaacttgaagccttttgagagggacatttccacagagatatatcaagcaggtaataaaccatgcaacggcgtcgccggatttaattgttatttccccctcaaatcatactcctttaggccaacttacggcgttggccaccaaccatacagagtcgtagtgctttcctttgaactgctgcacgcccctgccactgtgtgtggcccaaaaaagagcaccaatttggtaaagaacaag

SEQ ID NO: 2002 - DNA, 1278 bp, synthetic construct
  source 1..1278: mol_type = other DNA
aatatcacaaacttgtgcccatttgatgaggtcttcaatgccactcggtttgcatcagtatatgcatggaatcgtaaacggatatcaaattgcgttgctgactattcagtcctctataatcttgctccattctttacatttaaatgctacggagtatctcctactaagttgaatgacctttgcttcacaaatgtctatgctgacagttttgttattaggggtgacgaggtgcggcagattgcacccgggcaaacaggaaacatcgctgactacaattacaaacttcctgatgacttcactggttgtgtgattgcttggaattccaacaaactggattccaaagtgagtgggaattacaattacttgtatagattgtttagaaaatctaacctcaagccattcgaacgggatataagcacagaaatctatcaggctgggaataaaccttgtaacggcgtagccgggttcaattgctattttccacttagatcatacagctttaggcccacctacggggtgggacaccagccatatcgagtggtcgtactctctttcgagctgcttcatgcccccgcaaccgtgtgtggtcccaaaaaaagcaccaatctcgtcaagaataagggatcaggggggggcggatcaggcggtggaggcagcaacataactaatctttgtccattcgatgaagtctttaatgcaacccgttttgcttctgtgtatgcatggaacaggaaaagaatatccaattgcgttgccgactatagcgtcctttacaatctcgccccctttttcacatttaagtgttatggggtctcccccactaagctgaatgatctgtgtttcaccaacgtttatgcagactcctttgttatacggggggatgaagttcgacaaatagcacccgggcagacagggaacatcgctgactacaattacaagcttccagatgacttcactgggtgcgtaatcgcctggaacagtaacaaattggactctaaagtctctgggaattataattacctttatcgtctcttccgcaaaagtaacttgaagccttttgagagggacatttccacagagatatatcaagcaggtaataaaccatgcaacggcgtcgccggatttaattgttatttccccctcagatcatactcctttaggccaacttacggcgttggccaccaaccatacagagtcgtagtgctttcctttgaactgctgcacgcccctgccactgtgtgtggcccaaaaaagagcaccaatttggtaaagaacaag

SEQ ID NO: 2003 - DNA, 1278 bp, synthetic construct
  source 1..1278: mol_type = other DNA
aatatcacaaacttgtgcccatttgatgaggtcttcaatgccactaaatttgcatcagtatatgcatggaatcgtaaacggatatcaaattgcgttgctgactattcagtcctctataatcttgctccattctttacatttaaatgctacggagtatctcctactaagttgaatgacctttgcttcacaaatgtctatgctgacagttttgttattaggggtgacgaggtgcggcagattgcacccgggcaaacaggaaacatcgctgactacaattacaaacttcctgatgacttcactggttgtgtgattgcttggaattccaacaaactggattccaaagtgagtgggaattacaattacagatatagattgtttagaaaatctaacctcaagccattcgaacgggatataagcacagaaatctatcaggctgggaataaaccttgtaacggcgtaaaagggttcaattgctattttccacttaggtcatacagctttaggcccacctacggggtgggacaccagccatatcgagtggtcgtactctctttcgagctgcttcatgcccccgcaaccgtgtgtggtcccaaaaaaagcaccaatctcgtcaagaataagggatcaggggggggcggatcaggcggtggaggcagcaacataactaatctttgtccattcgatgaagtctttaatgcaaccaaatttgcttctgtgtatgcatggaacaggaaaagaatatccaattgcgttgccgactatagcgtcctttacaatctcgccccctttttcacatttaagtgttatggggtctcccccactaagctgaatgatctgtgtttcaccaacgtttatgcagactcctttgttatacggggggatgaagttcgacaaatagcacccgggcagacagggaacatcgctgactacaattacaagcttccagatgacttcactgggtgcgtaatcgcctggaacagtaacaaattggactctaaagtctctgggaattataattaccgttatcgtctcttccgcaaaagtaacttgaagccttttgagagggacatttccacagagatatatcaagcaggtaataaaccatgcaacggcgtcaaaggatttaattgttatttccccctcaggtcatactcctttaggccaacttacggcgttggccaccaaccatacagagtcgtagtgctttcctttgaactgctgcacgcccctgccactgtgtgtggcccaaaaaagagcaccaatttggtaaagaacaag

SEQ ID NO: 2004 - DNA, 1278 bp, synthetic construct
  source 1..1278: mol_type = other DNA
aatatcacaaacttgtgcccatttgatgaggtcttcaatgccactaaatttgcatcagtatatgcatggaatcgtaaacggatatcaaattgcgttgctgactattcagtcctctataatcttgctccattctttacatttaaatgctacggagtatctcctactaagttgaatgacctttgcttcacaaatgtctatgctgacagttttgttattaggggtgacgaggtgcggcagattgcacccgggcaaacaggaaacatcgctgactacaattacaaacttcctgatgacttcactggttgtgtgattgcttggaattccaacaaactggattccaaagtgagtgggaattacaattacagatatagattgtttagaaaatctaacctcaagccattcgaacgggatataagcacagaaatctatcaggctgggaataaaccttgtaacggcgtagccgggttcaattgctattttccacttaggtcatacagctttaggcccacctacggggtgggacaccagccatatcgagtggtcgtactctctttcgagctgcttcatgcccccgcaaccgtgtgtggtcccaaaaaaagcaccaatctcgtcaagaataagggatcaggggggggcggatcaggcggtggaggcagcaacataactaatctttgtccattcgatgaagtctttaatgcaaccaaatttgcttctgtgtatgcatggaacaggaaaagaatatccaattgcgttgccgactatagcgtcctttacaatctcgccccctttttcacatttaagtgttatggggtctcccccactaagctgaatgatctgtgtttcaccaacgtttatgcagactcctttgttatacggggggatgaagttcgacaaatagcacccgggcagacagggaacatcgctgactacaattacaagcttccagatgacttcactgggtgcgtaatcgcctggaacagtaacaaattggactctaaagtctctgggaattataattaccgttatcgtctcttccgcaaaagtaacttgaagccttttgagagggacatttccacagagatatatcaagcaggtaataaaccatgcaacggcgtcgccggatttaattgttatttccccctcaggtcatactcctttaggccaacttacggcgttggccaccaaccatacagagtcgtagtgctttcctttgaactgctgcacgcccctgccactgtgtgtggcccaaaaaagagcaccaatttggtaaagaacaag

SEQ ID NO: 2005 - DNA, 1278 bp, synthetic construct
  source 1..1278: mol_type = other DNA
aatatcacaaacttgtgcccatttgatgaggtcttcaatgccactaaatttgcatcagtatatgcatggaatcgtaaacggatatcaaattgcgttgctgactattcagtcctctataatcttgctccattctttacatttaaatgctacggagtatctcctactaagttgaatgacctttgcttcacaaatgtctatgctgacagttttgttattaggggtgacgaggtgcggcagattgcacccgggcaaacaggaaacatcgctgactacaattacaaacttcctgatgacttcactggttgtgtgattgcttggaattccaacaaactggattccaaagtgagtgggaattacaattacagatatagattgtttagaaaatctaacctcaagccattcgaacgggatataagcacagaaatctatcaggctgggaatagaccttgtaacggcgtagccgggttcaattgctattttccacttaggtcatacagctttaggcccacctacggggtgggacaccagccatatcgagtggtcgtactctctttcgagctgcttcatgcccccgcaaccgtgtgtggtcccaaaaaaagcaccaatctcgtcaagaataagggatcaggggggggcggatcaggcggtggaggcagcaacataactaatctttgtccattcgatgaagtctttaatgcaaccaaatttgcttctgtgtatgcatggaacaggaaaagaatatccaattgcgttgccgactatagcgtcctttacaatctcgccccctttttcacatttaagtgttatggggtctcccccactaagctgaatgatctgtgtttcaccaacgtttatgcagactcctttgttatacggggggatgaagttcgacaaatagcacccgggcagacagggaacatcgctgactacaattacaagcttccagatgacttcactgggtgcgtaatcgcctggaacagtaacaaattggactctaaagtctctgggaattataattaccgttatcgtctcttccgcaaaagtaacttgaagccttttgagagggacatttccacagagatatatcaagcaggtaatagaccatgcaacggcgtcgccggatttaattgttatttccccctcaggtcatactcctttaggccaacttacggcgttggccaccaaccatacagagtcgtagtgctttcctttgaactgctgcacgcccctgccactgtgtgtggcccaaaaaagagcaccaatttggtaaagaacaag

SEQ ID NO: 2006 - DNA, 1278 bp, synthetic construct
  source 1..1278: mol_type = other DNA
aatatcacaaacttgtgcccatttgatgaggtcttcaatgccactaaatttgcatcagtatatgcatggaatcgtaaacggatatcaaattgcgttgctgactattcagtcctctataatcttgctccattctttacatttaaatgctacggagtatctcctactaagttgaatgacctttgcttcacaaatgtctatgctgacagttttgttattaggggtgacgaggtgcggcagattgcacccgggcaaacaggaaacatcgctgactacaattacaaacttcctgatgacttcactggttgtgtgattgcttggaattccaacaaactggattccaaagtgagtgggaattacaattacagatatagattgtttagaaaatctaacctcaagccattcgaacgggatataagcacagaaatctatcaggctgggaatagaccttgtaacggcgtaaaggggttcaattgctattttccacttaggtcatacagctttaggcccacctacggggtgggacaccagccatatcgagtggtcgtactctctttcgagctgcttcatgcccccgcaaccgtgtgtggtcccaaaaaaagcaccaatctcgtcaagaataagggatcaggggggggcggatcaggcggtggaggcagcaacataactaatctttgtccattcgatgaagtctttaatgcaaccaaatttgcttctgtgtatgcatggaacaggaaaagaatatccaattgcgttgccgactatagcgtcctttacaatctcgccccctttttcacatttaagtgttatggggtctcccccactaagctgaatgatctgtgtttcaccaacgtttatgcagactcctttgttatacggggggatgaagttcgacaaatagcacccgggcagacagggaacatcgctgactacaattacaagcttccagatgacttcactgggtgcgtaatcgcctggaacagtaacaaattggactctaaagtctctgggaattataattaccgttatcgtctcttccgcaaaagtaacttgaagccttttgagagggacatttccacagagatatatcaagcaggtaatagaccatgcaacggcgtcaagggatttaattgttatttccccctcaggtcatactcctttaggccaacttacggcgttggccaccaaccatacagagtcgtagtgctttcctttgaactgctgcacgcccctgccactgtgtgtggcccaaaaaagagcaccaatttggtaaagaacaag

SEQ ID NO: 2007 - DNA, 1383 bp, synthetic construct
  source 1..1383: mol_type = other DNA
aatatcactaatctttgccccttcggggaagtatttaacgctactcgatttgctagcgtatatgcctggaaccggaagagaataagcaactgtgttgcagactatagcgtgctttacaattccgcatcctttagtaccttcaaatgttacggtgtgagccccaccaaactcaatgatctctgtttcacaaacgtgtacgcagatagtttcgttatacgcggggacgaagtacggcagatagcccctggccagacaggaaacatagccgattacaactacaaacttccagacgattttacagggtgtgtgatcgcttggaattcaaataacctggactccaaagtgggaggcaactataattacctgtaccgactgttccgcaaaagcaacttgaaacctttcgagcgagatatatcaaccgaaatctaccaagctggttctacaccttgtaatggtgtgaagggatttaactgctacttccctcttcagtcctatggatttcagcctacatacggagtcgggtatcaaccctatagagtcgtggtgttgtcatttgaacttctccatgcacctgctactgtctgtggtccaaaaaagtccactaatcttgtaaaaaacaaaggatccggatccggatccggatccggatccggatccggatccggatccggcggcggcggtgacggtggtggcggctccggagacaagacccacacctgccccccttgtcctgcccctgagctgctgggcggaccctccgtgtttctgttcccccccaagcccaaggacaccctgatgatcagccggacccccgaggtcacctgcgtggtggtggacgtcagccacgaggacccagaggtcaagttcaattggtatgtggacggcgtggaggtgcacaacgccaagaccaagccccgggaggaacagtacaacagcacctaccgggtggtgtccgtgctgaccgtgctgcaccaggactggctgaacggcaaagaatacaagtgcaaggtgtccaacaaggccctgcctgcccccatcgagaaaaccatcagcaaggccaagggccagcccagagaaccccaggtgtacaccctgccccctagcagggaagagctgaccaagaaccaggtgtccctgacctgtctggtcaagggcttctaccccagcgatatcgccgtggagtgggagagcaacggccagcctgagaacaactacaagaccaccccccctgtgctggacagcgacggcagcttcttcctgtacagcaagctgaccgtggacaagagccggtggcagcagggcaacgtgtttagctgcagcgtgatgcacgaggccctgcacaaccactacacccagaagagcttaagcctgtcccctggcagt

SEQ ID NO: 2008 - DNA, 1347 bp, synthetic construct
  source 1..1347: mol_type = other DNA
aatatcactaatctttgccccttcggggaagtatttaacgctactcgatttgctagcgtatatgcctggaaccggaagagaataagcaactgtgttgcagactatagcgtgctttacaattccgcatcctttagtaccttcaaatgttacggtgtgagccccaccaaactcaatgatctctgtttcacaaacgtgtacgcagatagtttcgttatacgcggggacgaagtacggcagatagcccctggccagacaggaaccatagccgattacaactacaaacttccagacgattttacagggtgtgtgatcgcttggaattcaaataacctggactccaaagtgggaggcaactataattacctgtaccgactgttccgcaaaagcaacttgaaacctttcgagcgagatatatcaaccgaaatctaccaagctggttctacaccttgtaatggtgtgaagggatttaactgctacttccctcttcagtcctatggatttcagcctacatacggagtcgggtatcaaccctatagagtcgtggtgttgtcatttgaacttctccatgcacctgctactgtctgtggtccaaaaaagtccactaatcttgtaaaaaacaaaggatccggatccggcggcggcggtgacggtggtggcggctccggagacaagacccacacctgccccccttgtcctgcccctgagctgctgggcggaccctccgtgtttctgttcccccccaagcccaaggacaccctgatgatcagccggacccccgaggtcacctgcgtggtggtggacgtcagccacgaggacccagaggtcaagttcaattggtatgtggacggcgtggaggtgcacaacgccaagaccaagccccgggaggaacagtacaacagcacctaccgggtggtgtccgtgctgaccgtgctgcaccaggactggctgaacggcaaagaatacaagtgcaaggtgtccaacaaggccctgcctgcccccatcgagaaaaccatcagcaaggccaagggccagcccagagaaccccaggtgtacaccctgccccctagcagggaagagctgaccaagaaccaggtgtccctgacctgtctggtcaagggcttctaccccagcgatatcgccgtggagtgggagagcaacggccagcctgagaacaactacaagaccaccccccctgtgctggacagcgacggcagcttcttcctgtacagcaagctgaccgtggacaagagccggtggcagcagggcaacgtgtttagctgcagcgtgatgcacgaggccctgcacaaccactacacccagaagagcttaagcctgtcccctggcagt

SEQ ID NO: 2009 - DNA, 1341 bp, synthetic construct
  source 1..1341: mol_type = other DNA
aatatcactaatctttgccccttcggggaagtatttaacgctactcgatttgctagcgtatatgcctggaaccggaagagaataagcaactgtgttgcagactatagcgtgctttacaattccgcatcctttagtaccttcaaatgttacggtgtgagccccaccaaactcaatgatctctgtttcacaaacgtgtacgcagatagtttcgttatacgcggggacgaagtacggcagatagcccctggccagacaggaaccatagccgattacaactacaaacttccagacgattttacagggtgtgtgatcgcttggaattcaaataacctggactccaaagtgggaggcaactataattacagataccgactgttccgcaaaagcaacttgaaacctttcgagcgagatatatcaaccgaaatctaccaagctggttctacaccttgtaatggtgtgaagggatttaactgctacttccctcttcagtcctatggatttcagcctacatacggagtcgggtatcaaccctatagagtcgtggtgttgtcatttgaacttctccatgcacctgctactgtctgtggtccaaaaaagtccactaatcttgtaaaaaacaaaggatccggcggcggcggtgacggtggtggcggctccggagacaagacccacacctgccccccttgtcctgcccctgagctgctgggcggaccctccgtgtttctgttcccccccaagcccaaggacaccctgatgatcagccggacccccgaggtcacctgcgtggtggtggacgtcagccacgaggacccagaggtcaagttcaattggtatgtggacggcgtggaggtgcacaacgccaagaccaagccccgggaggaacagtacaacagcacctaccgggtggtgtccgtgctgaccgtgctgcaccaggactggctgaacggcaaagaatacaagtgcaaggtgtccaacaaggccctgcctgcccccatcgagaaaaccatcagcaaggccaagggccagcccagagaaccccaggtgtacaccctgccccctagcagggaagagctgaccaagaaccaggtgtccctgacctgtctggtcaagggcttctaccccagcgatatcgccgtggagtgggagagcaacggccagcctgagaacaactacaagaccaccccccctgtgctggacagcgacggcagcttcttcctgtacagcaagctgaccgtggacaagagccggtggcagcagggcaacgtgtttagctgcagcgtgatgcacgaggccctgcacaaccactacacccagaagagcttaagcctgtcccctggcagt

SEQ ID NO: 2010 - DNA, 1347 bp, synthetic construct
  source 1..1347: mol_type = other DNA
aatatcactaatctttgccccttcggggaagtatttaacgctactcgatttgctagcgtatatgcctggaaccggaagagaataagcaactgtgttgcagactatagcgtgctttacaattccgcatcctttagtaccttcaaatgttacggtgtgagccccaccaaactcaatgatctctgtttcacaaacgtgtacgcagatagtttcgttatacgcggggacgaagtacggcagatagcccctggccagacaggaaagatagccgattacaactacaaacttccagacgattttacagggtgtgtgatcgcttggaattcaaataacctggactccaaagtgggaggcaactataattacagataccgactgttccgcaaaagcaacttgaaacctttcgagcgagatatatcaaccgaaatctaccaagctggttctaaaccttgtaatggtgtggagggatttaactgctacttccctcttcagtcctatggatttcagcctacaaatggagtcgggtatcaaccctatagagtcgtggtgttgtcatttgaacttctccatgcacctgctactgtctgtggtccaaaaaagtccactaatcttgtaaaaaacaaaggatccggatccggcggcggcggtgacggtggtggcggctccggagacaagacccacacctgccccccttgtcctgcccctgagctgctgggcggaccctccgtgtttctgttcccccccaagcccaaggacaccctgatgatcagccggacccccgaggtcacctgcgtggtggtggacgtcagccacgaggacccagaggtcaagttcaattggtatgtggacggcgtggaggtgcacaacgccaagaccaagccccgggaggaacagtacaacagcacctaccgggtggtgtccgtgctgaccgtgctgcaccaggactggctgaacggcaaagaatacaagtgcaaggtgtccaacaaggccctgcctgcccccatcgagaaaaccatcagcaaggccaagggccagcccagagaaccccaggtgtacaccctgccccctagcagggaagagctgaccaagaaccaggtgtccctgacctgtctggtcaagggcttctaccccagcgatatcgccgtggagtgggagagcaacggccagcctgagaacaactacaagaccaccccccctgtgctggacagcgacggcagcttcttcctgtacagcaagctgaccgtggacaagagccggtggcagcagggcaacgtgtttagctgcagcgtgatgcacgaggccctgcacaaccactacacccagaagagcttaagcctgtcccctggcagt

SEQ ID NO: 2011 - DNA, 1347 bp, synthetic construct
  source 1..1347: mol_type = other DNA
aatatcactaatctttgccccttcggggaagtatttaacgctactcgatttgctagcgtatatgcctggaaccggaagagaataagcaactgtgttgcagactatagcgtgctttacaattccgcatcctttagtaccttcaaatgttacggtgtgagccccaccaaactcaatgatctctgtttcacaaacgtgtacgcagatagtttcgttatacgcggggacgaagtacggcagatagcccctggccagacaggaaacatagccgattacaactacaaacttccagacgattttacagggtgtgtgatcgcttggaattcaaataacctggactccaaagtgggaggcaactataattacagataccgactgttccgcaaaagcaacttgaaacctttcgagcgagatatatcaaccgaaatctaccaagctggttctaaaccttgtaatggtgtggagggatttaactgctacttccctcttcagtcctatggatttcagcctacaaatggagtcgggtatcaaccctatagagtcgtggtgttgtcatttgaacttctccatgcacctgctactgtctgtggtccaaaaaagtccactaatcttgtaaaaaacaaaggatccggatccggcggcggcggtgacggtggtggcggctccggagacaagacccacacctgccccccttgtcctgcccctgagctgctgggcggaccctccgtgtttctgttcccccccaagcccaaggacaccctgatgatcagccggacccccgaggtcacctgcgtggtggtggacgtcagccacgaggacccagaggtcaagttcaattggtatgtggacggcgtggaggtgcacaacgccaagaccaagccccgggaggaacagtacaacagcacctaccgggtggtgtccgtgctgaccgtgctgcaccaggactggctgaacggcaaagaatacaagtgcaaggtgtccaacaaggccctgcctgcccccatcgagaaaaccatcagcaaggccaagggccagcccagagaaccccaggtgtacaccctgccccctagcagggaagagctgaccaagaaccaggtgtccctgacctgtctggtcaagggcttctaccccagcgatatcgccgtggagtgggagagcaacggccagcctgagaacaactacaagaccaccccccctgtgctggacagcgacggcagcttcttcctgtacagcaagctgaccgtggacaagagccggtggcagcagggcaacgtgtttagctgcagcgtgatgcacgaggccctgcacaaccactacacccagaagagcttaagcctgtcccctggcagt

SEQ ID NO: 2012 - DNA, 1341 bp, synthetic construct
  source 1..1341: mol_type = other DNA
aatatcactaatctttgccccttcggggaagtatttaacgctactaaatttgctagcgtatatgcctggaaccggaagagaataagcaactgtgttgcagactatagcgtgctttacaattccgcatcctttagtaccttcaaatgttacggtgtgagccccaccaaactcaatgatctctgtttcacaaacgtgtacgcagatagtttcgttatacgcggggacgaagtacggcagatagcccctggccagacaggaaagatagccgattacaactacaaacttccagacgattttacagggtgtgtgatcgcttggaattcaaataacctggactccaaagtgggaggcaactataattacctgtaccgactgttccgcaaaagcaacttgaaacctttcgagcgagatatatcaaccgaaatctaccaagctggttctacaccttgtaatggtgtgaagggatttaactgctacttccctcttcagtcctatggatttcagcctacatacggagtcgggtatcaaccctatagagtcgtggtgttgtcatttgaacttctccatgcacctgctactgtctgtggtccaaaaaagtccactaatcttgtaaaaaacaaaggatccggcggcggcggtgacggtggtggcggctccggagacaagacccacacctgccccccttgtcctgcccctgagctgctgggcggaccctccgtgtttctgttcccccccaagcccaaggacaccctgatgatcagccggacccccgaggtcacctgcgtggtggtggacgtcagccacgaggacccagaggtcaagttcaattggtatgtggacggcgtggaggtgcacaacgccaagaccaagccccgggaggaacagtacaacagcacctaccgggtggtgtccgtgctgaccgtgctgcaccaggactggctgaacggcaaagaatacaagtgcaaggtgtccaacaaggccctgcctgcccccatcgagaaaaccatcagcaaggccaagggccagcccagagaaccccaggtgtacaccctgccccctagcagggaagagctgaccaagaaccaggtgtccctgacctgtctggtcaagggcttctaccccagcgatatcgccgtggagtgggagagcaacggccagcctgagaacaactacaagaccaccccccctgtgctggacagcgacggcagcttcttcctgtacagcaagctgaccgtggacaagagccggtggcagcagggcaacgtgtttagctgcagcgtgatgcacgaggccctgcacaaccactacacccagaagagcttaagcctgtcccctggcagt

SEQ ID NO: 2013 - DNA, 1341 bp, synthetic construct
  source 1..1341: mol_type = other DNA
aatatcactaatctttgccccttcggggaagtatttaacgctactaaatttgctagcgtatatgcctggaaccggaagagaataagcaactgtgttgcagactatagcgtgctttacaattccgcatcctttagtaccttcaaatgttacggtgtgagccccaccaaactcaatgatctctgtttcacaaacgtgtacgcagatagtttcgttatacgcggggacgaagtacggcagatagcccctggccagacaggaaagatagccgattacaactacaaacttccagacgattttacagggtgtgtgatcgcttggaattcaaataacctggactccaaagtgggaggcaactataattacctgtaccgactgttccgcaaaagcaacttgaaacctttcgagcgagatatatcaaccgaaatctaccaagctggttctagaccttgtaatggtgtgaagggatttaactgctacttccctcttcagtcctatggatttcagcctacaaatggagtcgggtatcaaccctatagagtcgtggtgttgtcatttgaacttctccatgcacctgctactgtctgtggtccaaaaaagtccactaatcttgtaaaaaacaaaggatccggcggcggcggtgacggtggtggcggctccggagacaagacccacacctgccccccttgtcctgcccctgagctgctgggcggaccctccgtgtttctgttcccccccaagcccaaggacaccctgatgatcagccggacccccgaggtcacctgcgtggtggtggacgtcagccacgaggacccagaggtcaagttcaattggtatgtggacggcgtggaggtgcacaacgccaagaccaagccccgggaggaacagtacaacagcacctaccgggtggtgtccgtgctgaccgtgctgcaccaggactggctgaacggcaaagaatacaagtgcaaggtgtccaacaaggccctgcctgcccccatcgagaaaaccatcagcaaggccaagggccagcccagagaaccccaggtgtacaccctgccccctagcagggaagagctgaccaagaaccaggtgtccctgacctgtctggtcaagggcttctaccccagcgatatcgccgtggagtgggagagcaacggccagcctgagaacaactacaagaccaccccccctgtgctggacagcgacggcagcttcttcctgtacagcaagctgaccgtggacaagagccggtggcagcagggcaacgtgtttagctgcagcgtgatgcacgaggccctgcacaaccactacacccagaagagcttaagcctgtcccctggcagt

SEQ ID NO: 2014 - DNA, 1341 bp, synthetic construct
  source 1..1341: mol_type = other DNA
aatatcactaatctttgccccttcggggaagtatttaacgctactaaatttgctagcgtatatgcctggaaccggaagagaataagcaactgtgttgcagactatagcgtgctttacaattccgcatcctttagtaccttcaaatgttacggtgtgagccccaccaaactcaatgatctctgtttcacaaacgtgtacgcagatagtttcgttatacgcggggacgaagtacggcagatagcccctggccagacaggaaacatagccgattacaactacaaacttccagacgattttacagggtgtgtgatcgcttggaattcaaataacctggactccaaagtgggaggcaactataattacagataccgactgttccgcaaaagcaacttgaaacctttcgagcgagatatatcaaccgaaatctaccaagctggttctaaaccttgtaatggtgtgaagggatttaactgctacttccctcttcagtcctatggatttcagcctacatacggagtcgggtatcaaccctatagagtcgtggtgttgtcatttgaacttctccatgcacctgctactgtctgtggtccaaaaaagtccactaatcttgtaaaaaacaaaggatccggcggcggcggtgacggtggtggcggctccggagacaagacccacacctgccccccttgtcctgcccctgagctgctgggcggaccctccgtgtttctgttcccccccaagcccaaggacaccctgatgatcagccggacccccgaggtcacctgcgtggtggtggacgtcagccacgaggacccagaggtcaagttcaattggtatgtggacggcgtggaggtgcacaacgccaagaccaagccccgggaggaacagtacaacagcacctaccgggtggtgtccgtgctgaccgtgctgcaccaggactggctgaacggcaaagaatacaagtgcaaggtgtccaacaaggccctgcctgcccccatcgagaaaaccatcagcaaggccaagggccagcccagagaaccccaggtgtacaccctgccccctagcagggaagagctgaccaagaaccaggtgtccctgacctgtctggtcaagggcttctaccccagcgatatcgccgtggagtgggagagcaacggccagcctgagaacaactacaagaccaccccccctgtgctggacagcgacggcagcttcttcctgtacagcaagctgaccgtggacaagagccggtggcagcagggcaacgtgtttagctgcagcgtgatgcacgaggccctgcacaaccactacacccagaagagcttaagcctgtcccctggcagt

SEQ ID NO: 2015 - DNA, 1341 bp, synthetic construct
  source 1..1341: mol_type = other DNA
aatatcactaatctttgccccttcggggaagtatttaacgctactaaatttgctagcgtatatgcctggaaccggaagagaataagcaactgtgttgcagactatagcgtgctttacaattccgcatcctttagtaccttcaaatgttacggtgtgagccccaccaaactcaatgatctctgtttcacaaacgtgtacgcagatagtttcgttatacgcggggacgaagtacggcagatagcccctggccagacaggaaacatagccgattacaactacaaacttccagacgattttacagggtgtgtgatcgcttggaattcaaataacctggactccaaagtgggaggcaactataattacagataccgactgttccgcaaaagcaacttgaaacctttcgagcgagatatatcaaccgaaatctaccaagctggttctagaccttgtaatggtgtgaagggatttaactgctacttccctcttcagtcctatggatttcagcctacatacggagtcgggtatcaaccctatagagtcgtggtgttgtcatttgaacttctccatgcacctgctactgtctgtggtccaaaaaagtccactaatcttgtaaaaaacaaaggatccggcggcggcggtgacggtggtggcggctccggagacaagacccacacctgccccccttgtcctgcccctgagctgctgggcggaccctccgtgtttctgttcccccccaagcccaaggacaccctgatgatcagccggacccccgaggtcacctgcgtggtggtggacgtcagccacgaggacccagaggtcaagttcaattggtatgtggacggcgtggaggtgcacaacgccaagaccaagccccgggaggaacagtacaacagcacctaccgggtggtgtccgtgctgaccgtgctgcaccaggactggctgaacggcaaagaatacaagtgcaaggtgtccaacaaggccctgcctgcccccatcgagaaaaccatcagcaaggccaagggccagcccagagaaccccaggtgtacaccctgccccctagcagggaagagctgaccaagaaccaggtgtccctgacctgtctggtcaagggcttctaccccagcgatatcgccgtggagtgggagagcaacggccagcctgagaacaactacaagaccaccccccctgtgctggacagcgacggcagcttcttcctgtacagcaagctgaccgtggacaagagccggtggcagcagggcaacgtgtttagctgcagcgtgatgcacgaggccctgcacaaccactacacccagaagagcttaagcctgtcccctggcagt

SEQ ID NO: 2016 - DNA, 1341 bp, synthetic construct
  source 1..1341: mol_type = other DNA
aatatcactaatctttgccccttcgatgaagtatttaacgctactcgatttgctagcgtatatgcctggaaccggaagagaataagcaactgtgttgcagactatagcgtgctttacaatcttgctccattctttaccttcaaatgttacggtgtgagccccaccaaactcaatgatctctgtttcacaaacgtgtacgcagatagtttcgttatacgcggggacgaagtacggcagatagcccctggccagacaggaaacatagccgattacaactacaaacttccagacgattttacagggtgtgtgatcgcttggaattcaaaaaacctggactccaaagtgagtggcaactataattacctgtaccgactgttccgcaaaagcaacttgaaacctttcgagcgagatatatcaaccgaaatctaccaagctggtaataaaccttgtaatggtgtggccggatttaactgctacttccctcttaagtcctatagctttaggcctacatacggagtcgggcaccaaccctatagagtcgtggtgttgtcatttgaacttctccatgcacctgctactgtctgtggtccaaaaaagtccactaatcttgtaaaaaacaaaggatccggcggcggcggtgacggtggtggcggctccggagacaagacccacacctgccccccttgtcctgcccctgagctgctgggcggaccctccgtgtttctgttcccccccaagcccaaggacaccctgatgatcagccggacccccgaggtcacctgcgtggtggtggacgtcagccacgaggacccagaggtcaagttcaattggtatgtggacggcgtggaggtgcacaacgccaagaccaagccccgggaggaacagtacaacagcacctaccgggtggtgtccgtgctgaccgtgctgcaccaggactggctgaacggcaaagaatacaagtgcaaggtgtccaacaaggccctgcctgcccccatcgagaaaaccatcagcaaggccaagggccagcccagagaaccccaggtgtacaccctgccccctagcagggaagagctgaccaagaaccaggtgtccctgacctgtctggtcaagggcttctaccccagcgatatcgccgtggagtgggagagcaacggccagcctgagaacaactacaagaccaccccccctgtgctggacagcgacggcagcttcttcctgtacagcaagctgaccgtggacaagagccggtggcagcagggcaacgtgtttagctgcagcgtgatgcacgaggccctgcacaaccactacacccagaagagcttaagcctgtcccctggcagt

SEQ ID NO: 2017 - DNA, 1341 bp, synthetic construct
  source 1..1341: mol_type = other DNA
aatatcactaatctttgccccttcgatgaagtatttaacgctactcgatttgctagcgtatatgcctggaaccggaagagaataagcaactgtgttgcagactatagcgtgctttacaatcttgctccattctttaccttcaaatgttacggtgtgagccccaccaaactcaatgatctctgtttcacaaacgtgtacgcagatagtttcgttatacgcggggacgaagtacggcagatagcccctggccagacaggaaacatagccgattacaactacaaacttccagacgattttacagggtgtgtgatcgcttggaattcaaaaaacctggactccaaagtgagtggcaactataattacctgtaccgactgttccgcaaaagcaacttgaaacctttcgagcgagatatatcaaccgaaatctaccaagctggtaataaaccttgtaatggtgtggccggatttaactgctacttccctcttagatcctatagctttaggcctacatacggagtcgggcaccaaccctatagagtcgtggtgttgtcatttgaacttctccatgcacctgctactgtctgtggtccaaaaaagtccactaatcttgtaaaaaacaaaggatccggcggcggcggtgacggtggtggcggctccggagacaagacccacacctgccccccttgtcctgcccctgagctgctgggcggaccctccgtgtttctgttcccccccaagcccaaggacaccctgatgatcagccggacccccgaggtcacctgcgtggtggtggacgtcagccacgaggacccagaggtcaagttcaattggtatgtggacggcgtggaggtgcacaacgccaagaccaagccccgggaggaacagtacaacagcacctaccgggtggtgtccgtgctgaccgtgctgcaccaggactggctgaacggcaaagaatacaagtgcaaggtgtccaacaaggccctgcctgcccccatcgagaaaaccatcagcaaggccaagggccagcccagagaaccccaggtgtacaccctgccccctagcagggaagagctgaccaagaaccaggtgtccctgacctgtctggtcaagggcttctaccccagcgatatcgccgtggagtgggagagcaacggccagcctgagaacaactacaagaccaccccccctgtgctggacagcgacggcagcttcttcctgtacagcaagctgaccgtggacaagagccggtggcagcagggcaacgtgtttagctgcagcgtgatgcacgaggccctgcacaaccactacacccagaagagcttaagcctgtcccctggcagt

SEQ ID NO: 2018 - DNA, 1341 bp, synthetic construct
  source 1..1341: mol_type = other DNA
aatatcactaatctttgccccttcgatgaagtatttaacgctactaaatttgctagcgtatatgcctggaaccggaagagaataagcaactgtgttgcagactatagcgtgctttacaatcttgctccattctttaccttcaaatgttacggtgtgagccccaccaaactcaatgatctctgtttcacaaacgtgtacgcagatagtttcgttatacgcggggacgaagtacggcagatagcccctggccagacaggaaacatagccgattacaactacaaacttccagacgattttacagggtgtgtgatcgcttggaattcaaaaaacctggactccaaagtgagtggcaactataattacagataccgactgttccgcaaaagcaacttgaaacctttcgagcgagatatatcaaccgaaatctaccaagctggtaataaaccttgtaatggtgtgaagggatttaactgctacttccctcttagatcctatagctttaggcctacatacggagtcgggcaccaaccctatagagtcgtggtgttgtcatttgaacttctccatgcacctgctactgtctgtggtccaaaaaagtccactaatcttgtaaaaaacaaaggatccggcggcggcggtgacggtggtggcggctccggagacaagacccacacctgccccccttgtcctgcccctgagctgctgggcggaccctccgtgtttctgttcccccccaagcccaaggacaccctgatgatcagccggacccccgaggtcacctgcgtggtggtggacgtcagccacgaggacccagaggtcaagttcaattggtatgtggacggcgtggaggtgcacaacgccaagaccaagccccgggaggaacagtacaacagcacctaccgggtggtgtccgtgctgaccgtgctgcaccaggactggctgaacggcaaagaatacaagtgcaaggtgtccaacaaggccctgcctgcccccatcgagaaaaccatcagcaaggccaagggccagcccagagaaccccaggtgtacaccctgccccctagcagggaagagctgaccaagaaccaggtgtccctgacctgtctggtcaagggcttctaccccagcgatatcgccgtggagtgggagagcaacggccagcctgagaacaactacaagaccaccccccctgtgctggacagcgacggcagcttcttcctgtacagcaagctgaccgtggacaagagccggtggcagcagggcaacgtgtttagctgcagcgtgatgcacgaggccctgcacaaccactacacccagaagagcttaagcctgtcccctggcagt

SEQ ID NO: 2019 - DNA, 1341 bp, synthetic construct
  source 1..1341: mol_type = other DNA
aatatcactaatctttgccccttcgatgaagtatttaacgctactaaatttgctagcgtatatgcctggaaccggaagagaataagcaactgtgttgcagactatagcgtgctttacaatcttgctccattctttaccttcaaatgttacggtgtgagccccaccaaactcaatgatctctgtttcacaaacgtgtacgcagatagtttcgttatacgcggggacgaagtacggcagatagcccctggccagacaggaaacatagccgattacaactacaaacttccagacgattttacagggtgtgtgatcgcttggaattcaaaaaacctggactccaaagtgagtggcaactataattacagataccgactgttccgcaaaagcaacttgaaacctttcgagcgagatatatcaaccgaaatctaccaagctggtaataaaccttgtaatggtgtggccggatttaactgctacttccctcttagatcctatagctttaggcctacatacggagtcgggcaccaaccctatagagtcgtggtgttgtcatttgaacttctccatgcacctgctactgtctgtggtccaaaaaagtccactaatcttgtaaaaaacaaaggatccggcggcggcggtgacggtggtggcggctccggagacaagacccacacctgccccccttgtcctgcccctgagctgctgggcggaccctccgtgtttctgttcccccccaagcccaaggacaccctgatgatcagccggacccccgaggtcacctgcgtggtggtggacgtcagccacgaggacccagaggtcaagttcaattggtatgtggacggcgtggaggtgcacaacgccaagaccaagccccgggaggaacagtacaacagcacctaccgggtggtgtccgtgctgaccgtgctgcaccaggactggctgaacggcaaagaatacaagtgcaaggtgtccaacaaggccctgcctgcccccatcgagaaaaccatcagcaaggccaagggccagcccagagaaccccaggtgtacaccctgccccctagcagggaagagctgaccaagaaccaggtgtccctgacctgtctggtcaagggcttctaccccagcgatatcgccgtggagtgggagagcaacggccagcctgagaacaactacaagaccaccccccctgtgctggacagcgacggcagcttcttcctgtacagcaagctgaccgtggacaagagccggtggcagcagggcaacgtgtttagctgcagcgtgatgcacgaggccctgcacaaccactacacccagaagagcttaagcctgtcccctggcagt

SEQ ID NO: 2020 - DNA, 1341 bp, synthetic construct
  source 1..1341: mol_type = other DNA
aatatcactaatctttgccccttcgatgaagtatttaacgctactaaatttgctagcgtatatgcctggaaccggaagagaataagcaactgtgttgcagactatagcgtgctttacaatcttgctccattctttaccttcaaatgttacggtgtgagccccaccaaactcaatgatctctgtttcacaaacgtgtacgcagatagtttcgttatacgcggggacgaagtacggcagatagcccctggccagacaggaaacatagccgattacaactacaaacttccagacgattttacagggtgtgtgatcgcttggaattcaaaaaacctggactccaaagtgagtggcaactataattacagataccgactgttccgcaaaagcaacttgaaacctttcgagcgagatatatcaaccgaaatctaccaagctggtaatagaccttgtaatggtgtggccggatttaactgctacttccctcttagatcctatagctttaggcctacatacggagtcgggcaccaaccctatagagtcgtggtgttgtcatttgaacttctccatgcacctgctactgtctgtggtccaaaaaagtccactaatcttgtaaaaaacaaaggatccggcggcggcggtgacggtggtggcggctccggagacaagacccacacctgccccccttgtcctgcccctgagctgctgggcggaccctccgtgtttctgttcccccccaagcccaaggacaccctgatgatcagccggacccccgaggtcacctgcgtggtggtggacgtcagccacgaggacccagaggtcaagttcaattggtatgtggacggcgtggaggtgcacaacgccaagaccaagccccgggaggaacagtacaacagcacctaccgggtggtgtccgtgctgaccgtgctgcaccaggactggctgaacggcaaagaatacaagtgcaaggtgtccaacaaggccctgcctgcccccatcgagaaaaccatcagcaaggccaagggccagcccagagaaccccaggtgtacaccctgccccctagcagggaagagctgaccaagaaccaggtgtccctgacctgtctggtcaagggcttctaccccagcgatatcgccgtggagtgggagagcaacggccagcctgagaacaactacaagaccaccccccctgtgctggacagcgacggcagcttcttcctgtacagcaagctgaccgtggacaagagccggtggcagcagggcaacgtgtttagctgcagcgtgatgcacgaggccctgcacaaccactacacccagaagagcttaagcctgtcccctggcagt

SEQ ID NO: 2021 - DNA, 1341 bp, synthetic construct
  source 1..1341: mol_type = other DNA
aatatcactaatctttgccccttcgatgaagtatttaacgctactaaatttgctagcgtatatgcctggaaccggaagagaataagcaactgtgttgcagactatagcgtgctttacaatcttgctccattctttaccttcaaatgttacggtgtgagccccaccaaactcaatgatctctgtttcacaaacgtgtacgcagatagtttcgttatacgcggggacgaagtacggcagatagcccctggccagacaggaaacatagccgattacaactacaaacttccagacgattttacagggtgtgtgatcgcttggaattcaaaaaacctggactccaaagtgagtggcaactataattacagataccgactgttccgcaaaagcaacttgaaacctttcgagcgagatatatcaaccgaaatctaccaagctggtaatagaccttgtaatggtgtgaagggatttaactgctacttccctcttagatcctatagctttaggcctacatacggagtcgggcaccaaccctatagagtcgtggtgttgtcatttgaacttctccatgcacctgctactgtctgtggtccaaaaaagtccactaatcttgtaaaaaacaaaggatccggcggcggcggtgacggtggtggcggctccggagacaagacccacacctgccccccttgtcctgcccctgagctgctgggcggaccctccgtgtttctgttcccccccaagcccaaggacaccctgatgatcagccggacccccgaggtcacctgcgtggtggtggacgtcagccacgaggacccagaggtcaagttcaattggtatgtggacggcgtggaggtgcacaacgccaagaccaagccccgggaggaacagtacaacagcacctaccgggtggtgtccgtgctgaccgtgctgcaccaggactggctgaacggcaaagaatacaagtgcaaggtgtccaacaaggccctgcctgcccccatcgagaaaaccatcagcaaggccaagggccagcccagagaaccccaggtgtacaccctgccccctagcagggaagagctgaccaagaaccaggtgtccctgacctgtctggtcaagggcttctaccccagcgatatcgccgtggagtgggagagcaacggccagcctgagaacaactacaagaccaccccccctgtgctggacagcgacggcagcttcttcctgtacagcaagctgaccgtggacaagagccggtggcagcagggcaacgtgtttagctgcagcgtgatgcacgaggccctgcacaaccactacacccagaagagcttaagcctgtcccctggcagt

SEQ ID NO: 2022 - DNA, 2178 bp, synthetic construct
  source 1..2178: mol_type = other DNA
agggtacaaccaactgaaagtatagtccgattccccaatattactaacctttgccctttcggtgaggtattcaatgccacccgtttcgcctccgtctacgcatggaacaggaaaagaatatcaaactgcgtagctgactacagcgtcctttataatagcgcatctttctcaactttcaaatgctatggggtgagcccaactaaacttaacgatctgtgttttaccaatgtatacgctgactcatttgttattagaggcgatgaagttagacaaattgctcctggccagacaggcaagattgcagattataattataaactgccagatgattttactgggtgcgttatagcctggaattccaacaacctggatagtaaagtcggcgggaattataattatctttacaggctgtttcgcaagtctaacctgaagccttttgaaagggatatttctacagagatctatcaagctggctctaccccttgtaacggggttgaaggatttaattgctatttcccactccagtcatacggttttcagccaactaacggcgtaggataccagccctatcgggtggttgtcctgtccttcgagctcttgcacgccccagcaactgtatgtggtcccaaaaagagcaccaacttggtcaaaaataaatgcgtcaattttaatttcaatggtctcaccggtactggggttctgacagaatccggatctggtggggggggcagcggagggggcggaagtcgagttcagccaaccgagagcattgtacgcttccccaacattaccaatctttgtccatttggtgaggtgtttaatgctactcgattcgctagcgtctacgcttggaaccgcaaaaggatatctaactgcgtagccgattactctgtattgtacaattctgcatcatttagcacttttaaatgttatggagtgtcaccaactaaacttaacgacctttgcttcacaaatgtttacgctgattcttttgttattcggggtgacgaggttcggcaaatagccccaggacagactggcaaaatcgccgattacaattacaaactccccgacgactttaccggctgcgtcatagcctggaactctaacaacctggatagcaaagtaggagggaactataattacctctatcgcttgtttcgcaaatccaacctgaagccctttgaacgtgacatttccaccgagatatatcaagctggctccacaccttgtaacggagtagaggggtttaactgttacttccccttgcaatcctacggttttcaacccactaacggcgtaggataccaaccttatagagtcgttgtgctttcctttgaactccttcatgcaccagctacagtgtgtggaccaaagaaaagcacaaacctcgttaaaaacaaatgcgtaaatttcaactttaatgggctgactggaacaggggtcttgactgagtctggatccggcggcggcggtgacggtggtggcggctccggagacaagacccacacctgccccccttgtcctgcccctgagctgctgggcggaccctccgtgtttctgttcccccccaagcccaaggacaccctgatgatcagccggacccccgaggtcacctgcgtggtggtggacgtcagccacgaggacccagaggtcaagttcaattggtatgtggacggcgtggaggtgcacaacgccaagaccaagccccgggaggaacagtacaacagcacctaccgggtggtgtccgtgctgaccgtgctgcaccaggactggctgaacggcaaagaatacaagtgcaaggtgtccaacaaggccctgcctgcccccatcgagaaaaccatcagcaaggccaagggccagcccagagaaccccaggtgtacaccctgccccctagcagggaagagctgaccaagaaccaggtgtccctgacctgtctggtcaagggcttctaccccagcgatatcgccgtggagtgggagagcaacggccagcctgagaacaactacaagaccaccccccctgtgctggacagcgacggcagcttcttcctgtacagcaagctgaccgtggacaagagccggtggcagcagggcaacgtgtttagctgcagcgtgatgcacgaggccctgcacaaccactacacccagaagagcttaagcctgtcccctggcagt

SEQ ID NO: 2023 - DNA, 1998 bp, synthetic construct
  source 1..1998: mol_type = other DNA
aatatcacaaacttgtgcccatttggggaggtcttcaatgccactcggtttgcatcagtatatgcatggaatcgtaaacggatatcaaattgcgttgctgactattcagtcctctataatagtgctagtttcagtacatttaaatgctacggagtatctcctactaagttgaatgacctttgcttcacaaatgtctatgctgacagttttgttattaggggtgacgaggtgcggcagattgcacccgggcaaacaggaaacatcgctgactacaattacaaacttcctgatgacttcactggttgtgtgattgcttggaattccaacaatctggattccaaagtgggtgggaattacaattacttgtatagattgtttagaaaatctaacctcaagccattcgaacgggatataagcacagaaatctatcaggctgggagcacaccttgtaacggcgtaaaggggttcaattgctattttccacttcagtcatacggctttcaacccacctacggggtgggataccagccatatcgagtggtcgtactctctttcgagctgcttcatgcccccgcaaccgtgtgtggtcccaaaaaaagcaccaatctcgtcaagaataagggatcaggggggggcggatcaggcggtggaggcagcaacataactaatctttgtccattcggtgaagtctttaatgcaacccgttttgcttctgtgtatgcatggaacaggaaaagaatatccaattgcgttgccgactatagcgtcctttacaattctgcctcctttagcacatttaagtgttatggggtctcccccactaagctgaatgatctgtgtttcaccaacgtttatgcagactcctttgttatacggggggatgaagttcgacaaatagcacccgggcagacagggaacatcgctgactacaattacaagcttccagatgacttcactgggtgcgtaatcgcctggaacagtaacaacttggactctaaagtcggagggaattataattacctttatcgtctcttccgcaaaagtaacttgaagccttttgagagggacatttccacagagatatatcaagcaggttccacaccatgcaacggcgtcaagggatttaattgttatttccccctccaatcatacggctttcagccaacttacggcgttggctaccaaccatacagagtcgtagtgctttcctttgaactgctgcacgcccctgccactgtgtgtggcccaaaaaagagcaccaatttggtaaagaacaagggatccggcggcggcggtgacggtggtggcggctccggagacaagacccacacctgccccccttgtcctgcccctgagctgctgggcggaccctccgtgtttctgttcccccccaagcccaaggacaccctgatgatcagccggacccccgaggtcacctgcgtggtggtggacgtcagccacgaggacccagaggtcaagttcaattggtatgtggacggcgtggaggtgcacaacgccaagaccaagccccgggaggaacagtacaacagcacctaccgggtggtgtccgtgctgaccgtgctgcaccaggactggctgaacggcaaagaatacaagtgcaaggtgtccaacaaggccctgcctgcccccatcgagaaaaccatcagcaaggccaagggccagcccagagaaccccaggtgtacaccctgccccctagcagggaagagctgaccaagaaccaggtgtccctgacctgtctggtcaagggcttctaccccagcgatatcgccgtggagtgggagagcaacggccagcctgagaacaactacaagaccaccccccctgtgctggacagcgacggcagcttcttcctgtacagcaagctgaccgtggacaagagccggtggcagcagggcaacgtgtttagctgcagcgtgatgcacgaggccctgcacaaccactacacccagaagagcttaagcctgtcccctggcagt

SEQ ID NO: 2024 - DNA, 1998 bp, synthetic construct
  source 1..1998: mol_type = other DNA
aatatcacaaacttgtgcccatttggggaggtcttcaatgccactcggtttgcatcagtatatgcatggaatcgtaaacggatatcaaattgcgttgctgactattcagtcctctataatagtgctagtttcagtacatttaaatgctacggagtatctcctactaagttgaatgacctttgcttcacaaatgtctatgctgacagttttgttattaggggtgacgaggtgcggcagattgcacccgggcaaacaggaaccatcgctgactacaattacaaacttcctgatgacttcactggttgtgtgattgcttggaattccaacaatctggattccaaagtgggtgggaattacaattacttgtatagattgtttagaaaatctaacctcaagccattcgaacgggatataagcacagaaatctatcaggctgggagcacaccttgtaacggcgtaaaggggttcaattgctattttccacttcagtcatacggctttcaacccacctacggggtgggataccagccatatcgagtggtcgtactctctttcgagctgcttcatgcccccgcaaccgtgtgtggtcccaaaaaaagcaccaatctcgtcaagaataagggatcaggggggggcggatcaggcggtggaggcagcaacataactaatctttgtccattcggtgaagtctttaatgcaacccgttttgcttctgtgtatgcatggaacaggaaaagaatatccaattgcgttgccgactatagcgtcctttacaattctgcctcctttagcacatttaagtgttatggggtctcccccactaagctgaatgatctgtgtttcaccaacgtttatgcagactcctttgttatacggggggatgaagttcgacaaatagcacccgggcagacagggaccatcgctgactacaattacaagcttccagatgacttcactgggtgcgtaatcgcctggaacagtaacaacttggactctaaagtcggagggaattataattacctttatcgtctcttccgcaaaagtaacttgaagccttttgagagggacatttccacagagatatatcaagcaggttccacaccatgcaacggcgtcaagggatttaattgttatttccccctccaatcatacggctttcagccaacttacggcgttggctaccaaccatacagagtcgtagtgctttcctttgaactgctgcacgcccctgccactgtgtgtggcccaaaaaagagcaccaatttggtaaagaacaagggatccggcggcggcggtgacggtggtggcggctccggagacaagacccacacctgccccccttgtcctgcccctgagctgctgggcggaccctccgtgtttctgttcccccccaagcccaaggacaccctgatgatcagccggacccccgaggtcacctgcgtggtggtggacgtcagccacgaggacccagaggtcaagttcaattggtatgtggacggcgtggaggtgcacaacgccaagaccaagccccgggaggaacagtacaacagcacctaccgggtggtgtccgtgctgaccgtgctgcaccaggactggctgaacggcaaagaatacaagtgcaaggtgtccaacaaggccctgcctgcccccatcgagaaaaccatcagcaaggccaagggccagcccagagaaccccaggtgtacaccctgccccctagcagggaagagctgaccaagaaccaggtgtccctgacctgtctggtcaagggcttctaccccagcgatatcgccgtggagtgggagagcaacggccagcctgagaacaactacaagaccaccccccctgtgctggacagcgacggcagcttcttcctgtacagcaagctgaccgtggacaagagccggtggcagcagggcaacgtgtttagctgcagcgtgatgcacgaggccctgcacaaccactacacccagaagagcttaagcctgtcccctggcagt

SEQ ID NO: 2025 - DNA, 1998 bp, synthetic construct
  source 1..1998: mol_type = other DNA
aatatcacaaacttgtgcccatttggggaggtcttcaatgccactcggtttgcatcagtatatgcatggaatcgtaaacggatatcaaattgcgttgctgactattcagtcctctataatagtgctagtttcagtacatttaaatgctacggagtatctcctactaagttgaatgacctttgcttcacaaatgtctatgctgacagttttgttattaggggtgacgaggtgcggcagattgcacccgggcaaacaggaaagatcgctgactacaattacaaacttcctgatgacttcactggttgtgtgattgcttggaattccaacaatctggattccaaagtgggtgggaattacaattacagatatagattgtttagaaaatctaacctcaagccattcgaacgggatataagcacagaaatctatcaggctgggagcaaaccttgtaacggcgtagaggggttcaattgctattttccacttcagtcatacggctttcaacccaccaatggggtgggataccagccatatcgagtggtcgtactctctttcgagctgcttcatgcccccgcaaccgtgtgtggtcccaaaaaaagcaccaatctcgtcaagaataagggatcaggggggggcggatcaggcggtggaggcagcaacataactaatctttgtccattcggtgaagtctttaatgcaacccgttttgcttctgtgtatgcatggaacaggaaaagaatatccaattgcgttgccgactatagcgtcctttacaattctgcctcctttagcacatttaagtgttatggggtctcccccactaagctgaatgatctgtgtttcaccaacgtttatgcagactcctttgttatacggggggatgaagttcgacaaatagcacccgggcagacagggaagatcgctgactacaattacaagcttccagatgacttcactgggtgcgtaatcgcctggaacagtaacaacttggactctaaagtcggagggaattataattacagatatcgtctcttccgcaaaagtaacttgaagccttttgagagggacatttccacagagatatatcaagcaggttccaaaccatgcaacggcgtcgagggatttaattgttatttccccctccaatcatacggctttcagccaactaacggcgttggctaccaaccatacagagtcgtagtgctttcctttgaactgctgcacgcccctgccactgtgtgtggcccaaaaaagagcaccaatttggtaaagaacaagggatccggcggcggcggtgacggtggtggcggctccggagacaagacccacacctgccccccttgtcctgcccctgagctgctgggcggaccctccgtgtttctgttcccccccaagcccaaggacaccctgatgatcagccggacccccgaggtcacctgcgtggtggtggacgtcagccacgaggacccagaggtcaagttcaattggtatgtggacggcgtggaggtgcacaacgccaagaccaagccccgggaggaacagtacaacagcacctaccgggtggtgtccgtgctgaccgtgctgcaccaggactggctgaacggcaaagaatacaagtgcaaggtgtccaacaaggccctgcctgcccccatcgagaaaaccatcagcaaggccaagggccagcccagagaaccccaggtgtacaccctgccccctagcagggaagagctgaccaagaaccaggtgtccctgacctgtctggtcaagggcttctaccccagcgatatcgccgtggagtgggagagcaacggccagcctgagaacaactacaagaccaccccccctgtgctggacagcgacggcagcttcttcctgtacagcaagctgaccgtggacaagagccggtggcagcagggcaacgtgtttagctgcagcgtgatgcacgaggccctgcacaaccactacacccagaagagcttaagcctgtcccctggcagt

SEQ ID NO: 2026 - DNA, 1998 bp, synthetic construct
  source 1..1998: mol_type = other DNA
aatatcacaaacttgtgcccatttggggaggtcttcaatgccactcggtttgcatcagtatatgcatggaatcgtaaacggatatcaaattgcgttgctgactattcagtcctctataatagtgctagtttcagtacatttaaatgctacggagtatctcctactaagttgaatgacctttgcttcacaaatgtctatgctgacagttttgttattaggggtgacgaggtgcggcagattgcacccgggcaaacaggaaacatcgctgactacaattacaaacttcctgatgacttcactggttgtgtgattgcttggaattccaacaatctggattccaaagtgggtgggaattacaattacagatatagattgtttagaaaatctaacctcaagccattcgaacgggatataagcacagaaatctatcaggctgggagcaaaccttgtaacggcgtagaggggttcaattgctattttccacttcagtcatacggctttcaacccaccaatggggtgggataccagccatatcgagtggtcgtactctctttcgagctgcttcatgcccccgcaaccgtgtgtggtcccaaaaaaagcaccaatctcgtcaagaataagggatcaggggggggcggatcaggcggtggaggcagcaacataactaatctttgtccattcggtgaagtctttaatgcaacccgttttgcttctgtgtatgcatggaacaggaaaagaatatccaattgcgttgccgactatagcgtcctttacaattctgcctcctttagcacatttaagtgttatggggtctcccccactaagctgaatgatctgtgtttcaccaacgtttatgcagactcctttgttatacggggggatgaagttcgacaaatagcacccgggcagacagggaacatcgctgactacaattacaagcttccagatgacttcactgggtgcgtaatcgcctggaacagtaacaacttggactctaaagtcggagggaattataattacagatatcgtctcttccgcaaaagtaacttgaagccttttgagagggacatttccacagagatatatcaagcaggttccaaaccatgcaacggcgtcgagggatttaattgttatttccccctccaatcatacggctttcagccaactaacggcgttggctaccaaccatacagagtcgtagtgctttcctttgaactgctgcacgcccctgccactgtgtgtggcccaaaaaagagcaccaatttggtaaagaacaagggatccggcggcggcggtgacggtggtggcggctccggagacaagacccacacctgccccccttgtcctgcccctgagctgctgggcggaccctccgtgtttctgttcccccccaagcccaaggacaccctgatgatcagccggacccccgaggtcacctgcgtggtggtggacgtcagccacgaggacccagaggtcaagttcaattggtatgtggacggcgtggaggtgcacaacgccaagaccaagccccgggaggaacagtacaacagcacctaccgggtggtgtccgtgctgaccgtgctgcaccaggactggctgaacggcaaagaatacaagtgcaaggtgtccaacaaggccctgcctgcccccatcgagaaaaccatcagcaaggccaagggccagcccagagaaccccaggtgtacaccctgccccctagcagggaagagctgaccaagaaccaggtgtccctgacctgtctggtcaagggcttctaccccagcgatatcgccgtggagtgggagagcaacggccagcctgagaacaactacaagaccaccccccctgtgctggacagcgacggcagcttcttcctgtacagcaagctgaccgtggacaagagccggtggcagcagggcaacgtgtttagctgcagcgtgatgcacgaggccctgcacaaccactacacccagaagagcttaagcctgtcccctggcagt

SEQ ID NO: 2027 - DNA, 1998 bp, synthetic construct
  source 1..1998: mol_type = other DNA
aatatcacaaacttgtgcccatttggggaggtcttcaatgccactaaatttgcatcagtatatgcatggaatcgtaaacggatatcaaattgcgttgctgactattcagtcctctataatagtgctagtttcagtacatttaaatgctacggagtatctcctactaagttgaatgacctttgcttcacaaatgtctatgctgacagttttgttattaggggtgacgaggtgcggcagattgcacccgggcaaacaggaaagatcgctgactacaattacaaacttcctgatgacttcactggttgtgtgattgcttggaattccaacaatctggattccaaagtgggtgggaattacaattacttgtatagattgtttagaaaatctaacctcaagccattcgaacgggatataagcacagaaatctatcaggctgggagcacaccttgtaacggcgtaaaggggttcaattgctattttccacttcagtcatacggctttcaacccacctacggggtgggataccagccatatcgagtggtcgtactctctttcgagctgcttcatgcccccgcaaccgtgtgtggtcccaaaaaaagcaccaatctcgtcaagaataagggatcaggggggggcggatcaggcggtggaggcagcaacataactaatctttgtccattcggtgaagtctttaatgcaaccaaatttgcttctgtgtatgcatggaacaggaaaagaatatccaattgcgttgccgactatagcgtcctttacaattctgcctcctttagcacatttaagtgttatggggtctcccccactaagctgaatgatctgtgtttcaccaacgtttatgcagactcctttgttatacggggggatgaagttcgacaaatagcacccgggcagacagggaagatcgctgactacaattacaagcttccagatgacttcactgggtgcgtaatcgcctggaacagtaacaacttggactctaaagtcggagggaattataattacctttatcgtctcttccgcaaaagtaacttgaagccttttgagagggacatttccacagagatatatcaagcaggttccacaccatgcaacggcgtcaagggatttaattgttatttccccctccaatcatacggctttcagccaacttacggcgttggctaccaaccatacagagtcgtagtgctttcctttgaactgctgcacgcccctgccactgtgtgtggcccaaaaaagagcaccaatttggtaaagaacaagggatccggcggcggcggtgacggtggtggcggctccggagacaagacccacacctgccccccttgtcctgcccctgagctgctgggcggaccctccgtgtttctgttcccccccaagcccaaggacaccctgatgatcagccggacccccgaggtcacctgcgtggtggtggacgtcagccacgaggacccagaggtcaagttcaattggtatgtggacggcgtggaggtgcacaacgccaagaccaagccccgggaggaacagtacaacagcacctaccgggtggtgtccgtgctgaccgtgctgcaccaggactggctgaacggcaaagaatacaagtgcaaggtgtccaacaaggccctgcctgcccccatcgagaaaaccatcagcaaggccaagggccagcccagagaaccccaggtgtacaccctgccccctagcagggaagagctgaccaagaaccaggtgtccctgacctgtctggtcaagggcttctaccccagcgatatcgccgtggagtgggagagcaacggccagcctgagaacaactacaagaccaccccccctgtgctggacagcgacggcagcttcttcctgtacagcaagctgaccgtggacaagagccggtggcagcagggcaacgtgtttagctgcagcgtgatgcacgaggccctgcacaaccactacacccagaagagcttaagcctgtcccctggcagt

SEQ ID NO: 2028 - DNA, 1998 bp, synthetic construct
  source 1..1998: mol_type = other DNA
aatatcacaaacttgtgcccatttggggaggtcttcaatgccactaaatttgcatcagtatatgcatggaatcgtaaacggatatcaaattgcgttgctgactattcagtcctctataatagtgctagtttcagtacatttaaatgctacggagtatctcctactaagttgaatgacctttgcttcacaaatgtctatgctgacagttttgttattaggggtgacgaggtgcggcagattgcacccgggcaaacaggaaagatcgctgactacaattacaaacttcctgatgacttcactggttgtgtgattgcttggaattccaacaatctggattccaaagtgggtgggaattacaattacttgtatagattgtttagaaaatctaacctcaagccattcgaacgggatataagcacagaaatctatcaggctgggagcagaccttgtaacggcgtaaaggggttcaattgctattttccacttcagtcatacggctttcaacccaccaatggggtgggataccagccatatcgagtggtcgtactctctttcgagctgcttcatgcccccgcaaccgtgtgtggtcccaaaaaaagcaccaatctcgtcaagaataagggatcaggggggggcggatcaggcggtggaggcagcaacataactaatctttgtccattcggtgaagtctttaatgcaaccaaatttgcttctgtgtatgcatggaacaggaaaagaatatccaattgcgttgccgactatagcgtcctttacaattctgcctcctttagcacatttaagtgttatggggtctcccccactaagctgaatgatctgtgtttcaccaacgtttatgcagactcctttgttatacggggggatgaagttcgacaaatagcacccgggcagacagggaagatcgctgactacaattacaagcttccagatgacttcactgggtgcgtaatcgcctggaacagtaacaacttggactctaaagtcggagggaattataattacctttatcgtctcttccgcaaaagtaacttgaagccttttgagagggacatttccacagagatatatcaagcaggttccagaccatgcaacggcgtcaagggatttaattgttatttccccctccaatcatacggctttcagccaactaacggcgttggctaccaaccatacagagtcgtagtgctttcctttgaactgctgcacgcccctgccactgtgtgtggcccaaaaaagagcaccaatttggtaaagaacaagggatccggcggcggcggtgacggtggtggcggctccggagacaagacccacacctgccccccttgtcctgcccctgagctgctgggcggaccctccgtgtttctgttcccccccaagcccaaggacaccctgatgatcagccggacccccgaggtcacctgcgtggtggtggacgtcagccacgaggacccagaggtcaagttcaattggtatgtggacggcgtggaggtgcacaacgccaagaccaagccccgggaggaacagtacaacagcacctaccgggtggtgtccgtgctgaccgtgctgcaccaggactggctgaacggcaaagaatacaagtgcaaggtgtccaacaaggccctgcctgcccccatcgagaaaaccatcagcaaggccaagggccagcccagagaaccccaggtgtacaccctgccccctagcagggaagagctgaccaagaaccaggtgtccctgacctgtctggtcaagggcttctaccccagcgatatcgccgtggagtgggagagcaacggccagcctgagaacaactacaagaccaccccccctgtgctggacagcgacggcagcttcttcctgtacagcaagctgaccgtggacaagagccggtggcagcagggcaacgtgtttagctgcagcgtgatgcacgaggccctgcacaaccactacacccagaagagcttaagcctgtcccctggcagt

SEQ ID NO: 2029 - DNA, 1998 bp, synthetic construct
  source 1..1998: mol_type = other DNA
aatatcacaaacttgtgcccatttggggaggtcttcaatgccactaaatttgcatcagtatatgcatggaatcgtaaacggatatcaaattgcgttgctgactattcagtcctctataatagtgctagtttcagtacatttaaatgctacggagtatctcctactaagttgaatgacctttgcttcacaaatgtctatgctgacagttttgttattaggggtgacgaggtgcggcagattgcacccgggcaaacaggaaacatcgctgactacaattacaaacttcctgatgacttcactggttgtgtgattgcttggaattccaacaatctggattccaaagtgggtgggaattacaattacagatatagattgtttagaaaatctaacctcaagccattcgaacgggatataagcacagaaatctatcaggctgggagcaaaccttgtaacggcgtaaaggggttcaattgctattttccacttcagtcatacggctttcaacccacctacggggtgggataccagccatatcgagtggtcgtactctctttcgagctgcttcatgcccccgcaaccgtgtgtggtcccaaaaaaagcaccaatctcgtcaagaataagggatcaggggggggcggatcaggcggtggaggcagcaacataactaatctttgtccattcggtgaagtctttaatgcaaccaaatttgcttctgtgtatgcatggaacaggaaaagaatatccaattgcgttgccgactatagcgtcctttacaattctgcctcctttagcacatttaagtgttatggggtctcccccactaagctgaatgatctgtgtttcaccaacgtttatgcagactcctttgttatacggggggatgaagttcgacaaatagcacccgggcagacagggaacatcgctgactacaattacaagcttccagatgacttcactgggtgcgtaatcgcctggaacagtaacaacttggactctaaagtcggagggaattataattacagatatcgtctcttccgcaaaagtaacttgaagccttttgagagggacatttccacagagatatatcaagcaggttccaaaccatgcaacggcgtcaagggatttaattgttatttccccctccaatcatacggctttcagccaacttacggcgttggctaccaaccatacagagtcgtagtgctttcctttgaactgctgcacgcccctgccactgtgtgtggcccaaaaaagagcaccaatttggtaaagaacaagggatccggcggcggcggtgacggtggtggcggctccggagacaagacccacacctgccccccttgtcctgcccctgagctgctgggcggaccctccgtgtttctgttcccccccaagcccaaggacaccctgatgatcagccggacccccgaggtcacctgcgtggtggtggacgtcagccacgaggacccagaggtcaagttcaattggtatgtggacggcgtggaggtgcacaacgccaagaccaagccccgggaggaacagtacaacagcacctaccgggtggtgtccgtgctgaccgtgctgcaccaggactggctgaacggcaaagaatacaagtgcaaggtgtccaacaaggccctgcctgcccccatcgagaaaaccatcagcaaggccaagggccagcccagagaaccccaggtgtacaccctgccccctagcagggaagagctgaccaagaaccaggtgtccctgacctgtctggtcaagggcttctaccccagcgatatcgccgtggagtgggagagcaacggccagcctgagaacaactacaagaccaccccccctgtgctggacagcgacggcagcttcttcctgtacagcaagctgaccgtggacaagagccggtggcagcagggcaacgtgtttagctgcagcgtgatgcacgaggccctgcacaaccactacacccagaagagcttaagcctgtcccctggcagt

SEQ ID NO: 2030 - DNA, 1998 bp, synthetic construct
  source 1..1998: mol_type = other DNA
aatatcacaaacttgtgcccatttggggaggtcttcaatgccactaaatttgcatcagtatatgcatggaatcgtaaacggatatcaaattgcgttgctgactattcagtcctctataatagtgctagtttcagtacatttaaatgctacggagtatctcctactaagttgaatgacctttgcttcacaaatgtctatgctgacagttttgttattaggggtgacgaggtgcggcagattgcacccgggcaaacaggaaacatcgctgactacaattacaaacttcctgatgacttcactggttgtgtgattgcttggaattccaacaatctggattccaaagtgggtgggaattacaattacagatatagattgtttagaaaatctaacctcaagccattcgaacgggatataagcacagaaatctatcaggctgggagcagaccttgtaacggcgtaaaggggttcaattgctattttccacttcagtcatacggctttcaacccacctacggggtgggataccagccatatcgagtggtcgtactctctttcgagctgcttcatgcccccgcaaccgtgtgtggtcccaaaaaaagcaccaatctcgtcaagaataagggatcaggggggggcggatcaggcggtggaggcagcaacataactaatctttgtccattcggtgaagtctttaatgcaaccaaatttgcttctgtgtatgcatggaacaggaaaagaatatccaattgcgttgccgactatagcgtcctttacaattctgcctcctttagcacatttaagtgttatggggtctcccccactaagctgaatgatctgtgtttcaccaacgtttatgcagactcctttgttatacggggggatgaagttcgacaaatagcacccgggcagacagggaacatcgctgactacaattacaagcttccagatgacttcactgggtgcgtaatcgcctggaacagtaacaacttggactctaaagtcggagggaattataattacagatatcgtctcttccgcaaaagtaacttgaagccttttgagagggacatttccacagagatatatcaagcaggttccagaccatgcaacggcgtcaagggatttaattgttatttccccctccaatcatacggctttcagccaacttacggcgttggctaccaaccatacagagtcgtagtgctttcctttgaactgctgcacgcccctgccactgtgtgtggcccaaaaaagagcaccaatttggtaaagaacaagggatccggcggcggcggtgacggtggtggcggctccggagacaagacccacacctgccccccttgtcctgcccctgagctgctgggcggaccctccgtgtttctgttcccccccaagcccaaggacaccctgatgatcagccggacccccgaggtcacctgcgtggtggtggacgtcagccacgaggacccagaggtcaagttcaattggtatgtggacggcgtggaggtgcacaacgccaagaccaagccccgggaggaacagtacaacagcacctaccgggtggtgtccgtgctgaccgtgctgcaccaggactggctgaacggcaaagaatacaagtgcaaggtgtccaacaaggccctgcctgcccccatcgagaaaaccatcagcaaggccaagggccagcccagagaaccccaggtgtacaccctgccccctagcagggaagagctgaccaagaaccaggtgtccctgacctgtctggtcaagggcttctaccccagcgatatcgccgtggagtgggagagcaacggccagcctgagaacaactacaagaccaccccccctgtgctggacagcgacggcagcttcttcctgtacagcaagctgaccgtggacaagagccggtggcagcagggcaacgtgtttagctgcagcgtgatgcacgaggccctgcacaaccactacacccagaagagcttaagcctgtcccctggcagt

SEQ ID NO: 2031 - DNA, 1998 bp, synthetic construct
  source 1..1998: mol_type = other DNA
aatatcacaaacttgtgcccatttgatgaggtcttcaatgccactcggtttgcatcagtatatgcatggaatcgtaaacggatatcaaattgcgttgctgactattcagtcctctataatcttgctccattctttacatttaaatgctacggagtatctcctactaagttgaatgacctttgcttcacaaatgtctatgctgacagttttgttattaggggtgacgaggtgcggcagattgcacccgggcaaacaggaaacatcgctgactacaattacaaacttcctgatgacttcactggttgtgtgattgcttggaattccaacaaactggattccaaagtgagtgggaattacaattacttgtatagattgtttagaaaatctaacctcaagccattcgaacgggatataagcacagaaatctatcaggctgggaataaaccttgtaacggcgtagccgggttcaattgctattttccacttaagtcatacagctttaggcccacctacggggtgggacaccagccatatcgagtggtcgtactctctttcgagctgcttcatgcccccgcaaccgtgtgtggtcccaaaaaaagcaccaatctcgtcaagaataagggatcaggggggggcggatcaggcggtggaggcagcaacataactaatctttgtccattcgatgaagtctttaatgcaacccgttttgcttctgtgtatgcatggaacaggaaaagaatatccaattgcgttgccgactatagcgtcctttacaatctcgccccctttttcacatttaagtgttatggggtctcccccactaagctgaatgatctgtgtttcaccaacgtttatgcagactcctttgttatacggggggatgaagttcgacaaatagcacccgggcagacagggaacatcgctgactacaattacaagcttccagatgacttcactgggtgcgtaatcgcctggaacagtaacaaattggactctaaagtctctgggaattataattacctttatcgtctcttccgcaaaagtaacttgaagccttttgagagggacatttccacagagatatatcaagcaggtaataaaccatgcaacggcgtcgccggatttaattgttatttccccctcaaatcatactcctttaggccaacttacggcgttggccaccaaccatacagagtcgtagtgctttcctttgaactgctgcacgcccctgccactgtgtgtggcccaaaaaagagcaccaatttggtaaagaacaagggatccggcggcggcggtgacggtggtggcggctccggagacaagacccacacctgccccccttgtcctgcccctgagctgctgggcggaccctccgtgtttctgttcccccccaagcccaaggacaccctgatgatcagccggacccccgaggtcacctgcgtggtggtggacgtcagccacgaggacccagaggtcaagttcaattggtatgtggacggcgtggaggtgcacaacgccaagaccaagccccgggaggaacagtacaacagcacctaccgggtggtgtccgtgctgaccgtgctgcaccaggactggctgaacggcaaagaatacaagtgcaaggtgtccaacaaggccctgcctgcccccatcgagaaaaccatcagcaaggccaagggccagcccagagaaccccaggtgtacaccctgccccctagcagggaagagctgaccaagaaccaggtgtccctgacctgtctggtcaagggcttctaccccagcgatatcgccgtggagtgggagagcaacggccagcctgagaacaactacaagaccaccccccctgtgctggacagcgacggcagcttcttcctgtacagcaagctgaccgtggacaagagccggtggcagcagggcaacgtgtttagctgcagcgtgatgcacgaggccctgcacaaccactacacccagaagagcttaagcctgtcccctggcagt

SEQ ID NO: 2032 - DNA, 1998 bp, synthetic construct
  source 1..1998: mol_type = other DNA
aatatcacaaacttgtgcccatttgatgaggtcttcaatgccactcggtttgcatcagtatatgcatggaatcgtaaacggatatcaaattgcgttgctgactattcagtcctctataatcttgctccattctttacatttaaatgctacggagtatctcctactaagttgaatgacctttgcttcacaaatgtctatgctgacagttttgttattaggggtgacgaggtgcggcagattgcacccgggcaaacaggaaacatcgctgactacaattacaaacttcctgatgacttcactggttgtgtgattgcttggaattccaacaaactggattccaaagtgagtgggaattacaattacttgtatagattgtttagaaaatctaacctcaagccattcgaacgggatataagcacagaaatctatcaggctgggaataaaccttgtaacggcgtagccgggttcaattgctattttccacttagatcatacagctttaggcccacctacggggtgggacaccagccatatcgagtggtcgtactctctttcgagctgcttcatgcccccgcaaccgtgtgtggtcccaaaaaaagcaccaatctcgtcaagaataagggatcaggggggggcggatcaggcggtggaggcagcaacataactaatctttgtccattcgatgaagtctttaatgcaacccgttttgcttctgtgtatgcatggaacaggaaaagaatatccaattgcgttgccgactatagcgtcctttacaatctcgccccctttttcacatttaagtgttatggggtctcccccactaagctgaatgatctgtgtttcaccaacgtttatgcagactcctttgttatacggggggatgaagttcgacaaatagcacccgggcagacagggaacatcgctgactacaattacaagcttccagatgacttcactgggtgcgtaatcgcctggaacagtaacaaattggactctaaagtctctgggaattataattacctttatcgtctcttccgcaaaagtaacttgaagccttttgagagggacatttccacagagatatatcaagcaggtaataaaccatgcaacggcgtcgccggatttaattgttatttccccctcagatcatactcctttaggccaacttacggcgttggccaccaaccatacagagtcgtagtgctttcctttgaactgctgcacgcccctgccactgtgtgtggcccaaaaaagagcaccaatttggtaaagaacaagggatccggcggcggcggtgacggtggtggcggctccggagacaagacccacacctgccccccttgtcctgcccctgagctgctgggcggaccctccgtgtttctgttcccccccaagcccaaggacaccctgatgatcagccggacccccgaggtcacctgcgtggtggtggacgtcagccacgaggacccagaggtcaagttcaattggtatgtggacggcgtggaggtgcacaacgccaagaccaagccccgggaggaacagtacaacagcacctaccgggtggtgtccgtgctgaccgtgctgcaccaggactggctgaacggcaaagaatacaagtgcaaggtgtccaacaaggccctgcctgcccccatcgagaaaaccatcagcaaggccaagggccagcccagagaaccccaggtgtacaccctgccccctagcagggaagagctgaccaagaaccaggtgtccctgacctgtctggtcaagggcttctaccccagcgatatcgccgtggagtgggagagcaacggccagcctgagaacaactacaagaccaccccccctgtgctggacagcgacggcagcttcttcctgtacagcaagctgaccgtggacaagagccggtggcagcagggcaacgtgtttagctgcagcgtgatgcacgaggccctgcacaaccactacacccagaagagcttaagcctgtcccctggcagt

SEQ ID NO: 2033 - DNA, 1998 bp, synthetic construct
  source 1..1998: mol_type = other DNA
aatatcacaaacttgtgcccatttgatgaggtcttcaatgccactaaatttgcatcagtatatgcatggaatcgtaaacggatatcaaattgcgttgctgactattcagtcctctataatcttgctccattctttacatttaaatgctacggagtatctcctactaagttgaatgacctttgcttcacaaatgtctatgctgacagttttgttattaggggtgacgaggtgcggcagattgcacccgggcaaacaggaaacatcgctgactacaattacaaacttcctgatgacttcactggttgtgtgattgcttggaattccaacaaactggattccaaagtgagtgggaattacaattacagatatagattgtttagaaaatctaacctcaagccattcgaacgggatataagcacagaaatctatcaggctgggaataaaccttgtaacggcgtaaaagggttcaattgctattttccacttaggtcatacagctttaggcccacctacggggtgggacaccagccatatcgagtggtcgtactctctttcgagctgcttcatgcccccgcaaccgtgtgtggtcccaaaaaaagcaccaatctcgtcaagaataagggatcaggggggggcggatcaggcggtggaggcagcaacataactaatctttgtccattcgatgaagtctttaatgcaaccaaatttgcttctgtgtatgcatggaacaggaaaagaatatccaattgcgttgccgactatagcgtcctttacaatctcgccccctttttcacatttaagtgttatggggtctcccccactaagctgaatgatctgtgtttcaccaacgtttatgcagactcctttgttatacggggggatgaagttcgacaaatagcacccgggcagacagggaacatcgctgactacaattacaagcttccagatgacttcactgggtgcgtaatcgcctggaacagtaacaaattggactctaaagtctctgggaattataattaccgttatcgtctcttccgcaaaagtaacttgaagccttttgagagggacatttccacagagatatatcaagcaggtaataaaccatgcaacggcgtcaaaggatttaattgttatttccccctcaggtcatactcctttaggccaacttacggcgttggccaccaaccatacagagtcgtagtgctttcctttgaactgctgcacgcccctgccactgtgtgtggcccaaaaaagagcaccaatttggtaaagaacaagggatccggcggcggcggtgacggtggtggcggctccggagacaagacccacacctgccccccttgtcctgcccctgagctgctgggcggaccctccgtgtttctgttcccccccaagcccaaggacaccctgatgatcagccggacccccgaggtcacctgcgtggtggtggacgtcagccacgaggacccagaggtcaagttcaattggtatgtggacggcgtggaggtgcacaacgccaagaccaagccccgggaggaacagtacaacagcacctaccgggtggtgtccgtgctgaccgtgctgcaccaggactggctgaacggcaaagaatacaagtgcaaggtgtccaacaaggccctgcctgcccccatcgagaaaaccatcagcaaggccaagggccagcccagagaaccccaggtgtacaccctgccccctagcagggaagagctgaccaagaaccaggtgtccctgacctgtctggtcaagggcttctaccccagcgatatcgccgtggagtgggagagcaacggccagcctgagaacaactacaagaccaccccccctgtgctggacagcgacggcagcttcttcctgtacagcaagctgaccgtggacaagagccggtggcagcagggcaacgtgtttagctgcagcgtgatgcacgaggccctgcacaaccactacacccagaagagcttaagcctgtcccctggcagt

SEQ ID NO: 2034 - DNA, 1998 bp, synthetic construct
  source 1..1998: mol_type = other DNA
aatatcacaaacttgtgcccatttgatgaggtcttcaatgccactaaatttgcatcagtatatgcatggaatcgtaaacggatatcaaattgcgttgctgactattcagtcctctataatcttgctccattctttacatttaaatgctacggagtatctcctactaagttgaatgacctttgcttcacaaatgtctatgctgacagttttgttattaggggtgacgaggtgcggcagattgcacccgggcaaacaggaaacatcgctgactacaattacaaacttcctgatgacttcactggttgtgtgattgcttggaattccaacaaactggattccaaagtgagtgggaattacaattacagatatagattgtttagaaaatctaacctcaagccattcgaacgggatataagcacagaaatctatcaggctgggaataaaccttgtaacggcgtagccgggttcaattgctattttccacttaggtcatacagctttaggcccacctacggggtgggacaccagccatatcgagtggtcgtactctctttcgagctgcttcatgcccccgcaaccgtgtgtggtcccaaaaaaagcaccaatctcgtcaagaataagggatcaggggggggcggatcaggcggtggaggcagcaacataactaatctttgtccattcgatgaagtctttaatgcaaccaaatttgcttctgtgtatgcatggaacaggaaaagaatatccaattgcgttgccgactatagcgtcctttacaatctcgccccctttttcacatttaagtgttatggggtctcccccactaagctgaatgatctgtgtttcaccaacgtttatgcagactcctttgttatacggggggatgaagttcgacaaatagcacccgggcagacagggaacatcgctgactacaattacaagcttccagatgacttcactgggtgcgtaatcgcctggaacagtaacaaattggactctaaagtctctgggaattataattaccgttatcgtctcttccgcaaaagtaacttgaagccttttgagagggacatttccacagagatatatcaagcaggtaataaaccatgcaacggcgtcgccggatttaattgttatttccccctcaggtcatactcctttaggccaacttacggcgttggccaccaaccatacagagtcgtagtgctttcctttgaactgctgcacgcccctgccactgtgtgtggcccaaaaaagagcaccaatttggtaaagaacaagggatccggcggcggcggtgacggtggtggcggctccggagacaagacccacacctgccccccttgtcctgcccctgagctgctgggcggaccctccgtgtttctgttcccccccaagcccaaggacaccctgatgatcagccggacccccgaggtcacctgcgtggtggtggacgtcagccacgaggacccagaggtcaagttcaattggtatgtggacggcgtggaggtgcacaacgccaagaccaagccccgggaggaacagtacaacagcacctaccgggtggtgtccgtgctgaccgtgctgcaccaggactggctgaacggcaaagaatacaagtgcaaggtgtccaacaaggccctgcctgcccccatcgagaaaaccatcagcaaggccaagggccagcccagagaaccccaggtgtacaccctgccccctagcagggaagagctgaccaagaaccaggtgtccctgacctgtctggtcaagggcttctaccccagcgatatcgccgtggagtgggagagcaacggccagcctgagaacaactacaagaccaccccccctgtgctggacagcgacggcagcttcttcctgtacagcaagctgaccgtggacaagagccggtggcagcagggcaacgtgtttagctgcagcgtgatgcacgaggccctgcacaaccactacacccagaagagcttaagcctgtcccctggcagt

SEQ ID NO: 2035 - DNA, 1998 bp, synthetic construct
  source 1..1998: mol_type = other DNA
aatatcacaaacttgtgcccatttgatgaggtcttcaatgccactaaatttgcatcagtatatgcatggaatcgtaaacggatatcaaattgcgttgctgactattcagtcctctataatcttgctccattctttacatttaaatgctacggagtatctcctactaagttgaatgacctttgcttcacaaatgtctatgctgacagttttgttattaggggtgacgaggtgcggcagattgcacccgggcaaacaggaaacatcgctgactacaattacaaacttcctgatgacttcactggttgtgtgattgcttggaattccaacaaactggattccaaagtgagtgggaattacaattacagatatagattgtttagaaaatctaacctcaagccattcgaacgggatataagcacagaaatctatcaggctgggaatagaccttgtaacggcgtagccgggttcaattgctattttccacttaggtcatacagctttaggcccacctacggggtgggacaccagccatatcgagtggtcgtactctctttcgagctgcttcatgcccccgcaaccgtgtgtggtcccaaaaaaagcaccaatctcgtcaagaataagggatcaggggggggcggatcaggcggtggaggcagcaacataactaatctttgtccattcgatgaagtctttaatgcaaccaaatttgcttctgtgtatgcatggaacaggaaaagaatatccaattgcgttgccgactatagcgtcctttacaatctcgccccctttttcacatttaagtgttatggggtctcccccactaagctgaatgatctgtgtttcaccaacgtttatgcagactcctttgttatacggggggatgaagttcgacaaatagcacccgggcagacagggaacatcgctgactacaattacaagcttccagatgacttcactgggtgcgtaatcgcctggaacagtaacaaattggactctaaagtctctgggaattataattaccgttatcgtctcttccgcaaaagtaacttgaagccttttgagagggacatttccacagagatatatcaagcaggtaatagaccatgcaacggcgtcgccggatttaattgttatttccccctcaggtcatactcctttaggccaacttacggcgttggccaccaaccatacagagtcgtagtgctttcctttgaactgctgcacgcccctgccactgtgtgtggcccaaaaaagagcaccaatttggtaaagaacaagggatccggcggcggcggtgacggtggtggcggctccggagacaagacccacacctgccccccttgtcctgcccctgagctgctgggcggaccctccgtgtttctgttcccccccaagcccaaggacaccctgatgatcagccggacccccgaggtcacctgcgtggtggtggacgtcagccacgaggacccagaggtcaagttcaattggtatgtggacggcgtggaggtgcacaacgccaagaccaagccccgggaggaacagtacaacagcacctaccgggtggtgtccgtgctgaccgtgctgcaccaggactggctgaacggcaaagaatacaagtgcaaggtgtccaacaaggccctgcctgcccccatcgagaaaaccatcagcaaggccaagggccagcccagagaaccccaggtgtacaccctgccccctagcagggaagagctgaccaagaaccaggtgtccctgacctgtctggtcaagggcttctaccccagcgatatcgccgtggagtgggagagcaacggccagcctgagaacaactacaagaccaccccccctgtgctggacagcgacggcagcttcttcctgtacagcaagctgaccgtggacaagagccggtggcagcagggcaacgtgtttagctgcagcgtgatgcacgaggccctgcacaaccactacacccagaagagcttaagcctgtcccctggcagt

SEQ ID NO: 2036 - DNA, 1998 bp, synthetic construct
  source 1..1998: mol_type = other DNA
aatatcacaaacttgtgcccatttgatgaggtcttcaatgccactaaatttgcatcagtatatgcatggaatcgtaaacggatatcaaattgcgttgctgactattcagtcctctataatcttgctccattctttacatttaaatgctacggagtatctcctactaagttgaatgacctttgcttcacaaatgtctatgctgacagttttgttattaggggtgacgaggtgcggcagattgcacccgggcaaacaggaaacatcgctgactacaattacaaacttcctgatgacttcactggttgtgtgattgcttggaattccaacaaactggattccaaagtgagtgggaattacaattacagatatagattgtttagaaaatctaacctcaagccattcgaacgggatataagcacagaaatctatcaggctgggaatagaccttgtaacggcgtaaaggggttcaattgctattttccacttaggtcatacagctttaggcccacctacggggtgggacaccagccatatcgagtggtcgtactctctttcgagctgcttcatgcccccgcaaccgtgtgtggtcccaaaaaaagcaccaatctcgtcaagaataagggatcaggggggggcggatcaggcggtggaggcagcaacataactaatctttgtccattcgatgaagtctttaatgcaaccaaatttgcttctgtgtatgcatggaacaggaaaagaatatccaattgcgttgccgactatagcgtcctttacaatctcgccccctttttcacatttaagtgttatggggtctcccccactaagctgaatgatctgtgtttcaccaacgtttatgcagactcctttgttatacggggggatgaagttcgacaaatagcacccgggcagacagggaacatcgctgactacaattacaagcttccagatgacttcactgggtgcgtaatcgcctggaacagtaacaaattggactctaaagtctctgggaattataattaccgttatcgtctcttccgcaaaagtaacttgaagccttttgagagggacatttccacagagatatatcaagcaggtaatagaccatgcaacggcgtcaagggatttaattgttatttccccctcaggtcatactcctttaggccaacttacggcgttggccaccaaccatacagagtcgtagtgctttcctttgaactgctgcacgcccctgccactgtgtgtggcccaaaaaagagcaccaatttggtaaagaacaagggatccggcggcggcggtgacggtggtggcggctccggagacaagacccacacctgccccccttgtcctgcccctgagctgctgggcggaccctccgtgtttctgttcccccccaagcccaaggacaccctgatgatcagccggacccccgaggtcacctgcgtggtggtggacgtcagccacgaggacccagaggtcaagttcaattggtatgtggacggcgtggaggtgcacaacgccaagaccaagccccgggaggaacagtacaacagcacctaccgggtggtgtccgtgctgaccgtgctgcaccaggactggctgaacggcaaagaatacaagtgcaaggtgtccaacaaggccctgcctgcccccatcgagaaaaccatcagcaaggccaagggccagcccagagaaccccaggtgtacaccctgccccctagcagggaagagctgaccaagaaccaggtgtccctgacctgtctggtcaagggcttctaccccagcgatatcgccgtggagtgggagagcaacggccagcctgagaacaactacaagaccaccccccctgtgctggacagcgacggcagcttcttcctgtacagcaagctgaccgtggacaagagccggtggcagcagggcaacgtgtttagctgcagcgtgatgcacgaggccctgcacaaccactacacccagaagagcttaagcctgtcccctggcagt

SEQ ID NO: 2037 - protein, 163 aa, synthetic construct
VLYNSASFSTFKCYGVSPTKLNDLCFTNVYADSFVIRGDEVRQIAPGQTGNIADYNYKLPDDFTGCVIAWNSNNLDSKVGGNYNYLYRLFRKSNLKPFERDISTEIYQAGSTPCNGVKGFNCYFPLQSYGFQPTYGVGYQPYRVVVLSFELLHAPATVCGPKK

SEQ ID NO: 2038 - protein, 163 aa, synthetic construct
VLYNSASFSTFKCYGVSPTKLNDLCFTNVYADSFVIRGDEVRQIAPGQTGNIADYNYKLPDDFTGCVIAWNSNNLDSKVGGNYNYRYRLFRKSNLKPFERDISTEIYQAGSKPCNGVKGFNCYFPLQSYGFQPTYGVGYQPYRVVVLSFELLHAPATVCGPKK

SEQ ID NO: 2039 - protein, 163 aa, synthetic construct
VLYNSASFSTFKCYGVSPTKLNDLCFTNVYADSFVIRGDEVRQIAPGQTGNIADYNYKLPDDFTGCVIAWNSNNLDSKVGGNYNYRYRLFRKSNLKPFERDISTEIYQAGSRPCNGVKGFNCYFPLQSYGFQPTYGVGYQPYRVVVLSFELLHAPATVCGPKK

SEQ ID NO: 2040 - protein, 163 aa, synthetic construct
VLYNSASFSTFKCYGVSPTKLNDLCFTNVYADSFVIRGDEVRQIAPGQTGTIADYNYKLPDDFTGCVIAWNSNNLDSKVGGNYNYRYRLFRKSNLKPFERDISTEIYQAGSTPCNGVKGFNCYFPLQSYGFQPTYGVGYQPYRVVVLSFELLHAPATVCGPKK

SEQ ID NO: 2041 - DNA, 489 bp, synthetic construct
  source 1..489: mol_type = other DNA
gtgctttacaattccgcatcctttagtaccttcaaatgttacggtgtgagccccaccaaactcaatgatctctgtttcacaaacgtgtacgcagatagtttcgttatacgcggggacgaagtacggcagatagcccctggccagacaggaaacatagccgattacaactacaaacttccagacgattttacagggtgtgtgatcgcttggaattcaaataacctggactccaaagtgggaggcaactataattacagataccgactgttccgcaaaagcaacttgaaacctttcgagcgagatatatcaaccgaaatctaccaagctggttctaaaccttgtaatggtgtggagggatttaactgctacttccctcttcagtcctatggatttcagcctacaaatggagtcgggtatcaaccctatagagtcgtggtgttgtcatttgaacttctccatgcacctgctactgtctgtggtccaaaaaag

SEQ ID NO: 2042 - DNA, 489 bp, synthetic construct
  source 1..489: mol_type = other DNA
gtgctttacaattccgcatcctttagtaccttcaaatgttacggtgtgagccccaccaaactcaatgatctctgtttcacaaacgtgtacgcagatagtttcgttatacgcggggacgaagtacggcagatagcccctggccagacaggaaacatagccgattacaactacaaacttccagacgattttacagggtgtgtgatcgcttggaattcaaataacctggactccaaagtgggaggcaactataattacagataccgactgttccgcaaaagcaacttgaaacctttcgagcgagatatatcaaccgaaatctaccaagctggttctaaaccttgtaatggtgtgaagggatttaactgctacttccctcttcagtcctatggatttcagcctacatacggagtcgggtatcaaccctatagagtcgtggtgttgtcatttgaacttctccatgcacctgctactgtctgtggtccaaaaaag

SEQ ID NO: 2043 - DNA, 489 bp, synthetic construct
  source 1..489: mol_type = other DNA
gtgctttacaattccgcatcctttagtaccttcaaatgttacggtgtgagccccaccaaactcaatgatctctgtttcacaaacgtgtacgcagatagtttcgttatacgcggggacgaagtacggcagatagcccctggccagacaggaaacatagccgattacaactacaaacttccagacgattttacagggtgtgtgatcgcttggaattcaaataacctggactccaaagtgggaggcaactataattacagataccgactgttccgcaaaagcaacttgaaacctttcgagcgagatatatcaaccgaaatctaccaagctggttctagaccttgtaatggtgtgaagggatttaactgctacttccctcttcagtcctatggatttcagcctacatacggagtcgggtatcaaccctatagagtcgtggtgttgtcatttgaacttctccatgcacctgctactgtctgtggtccaaaaaag

SEQ ID NO: 2044 - DNA, 489 bp, synthetic construct
  source 1..489: mol_type = other DNA
gtgctttacaattccgcatcctttagtaccttcaaatgttacggtgtgagccccaccaaactcaatgatctctgtttcacaaacgtgtacgcagatagtttcgttatacgcggggacgaagtacggcagatagcccctggccagacaggaaccatagccgattacaactacaaacttccagacgattttacagggtgtgtgatcgcttggaattcaaataacctggactccaaagtgggaggcaactataattacagataccgactgttccgcaaaagcaacttgaaacctttcgagcgagatatatcaaccgaaatctaccaagctggttctacaccttgtaatggtgtgaagggatttaactgctacttccctcttcagtcctatggatttcagcctacatacggagtcgggtatcaaccctatagagtcgtggtgttgtcatttgaacttctccatgcacctgctactgtctgtggtccaaaaaag

SEQ ID NO: 2045 - protein, 163 aa, synthetic construct
VLYNFAPFFAFKCYGVSPTKLNDLCFTNVYADSFVIRGNEVSQIAPGQTGNIADYNYKLPDDFTGCVIAWNSNKLDSTVGGNYNYRYRLFRKSKLKPFERDISTEIYQAGNKPCNGVAGVNCYFPLQSYGFRPTYGVGHQPYRVVVLSFELLHAPATVCGPKK

SEQ ID NO: 2046 - protein, 163 aa, synthetic construct
VLYNFAPFFAFKCYGVSPTKLNDLCFTNVYADSFVIRGNEVSQIAPGQTGNIADYNYKLPDDFTGCVIAWNSNKLDSKPSGNYNYRYRLFRKSKLKPFERDISTEIYQAGNKPCNGVAGSNCYSPLQSYGFRPTYGVGHQPYRVVVLSFELLHAPATVCGPKK

SEQ ID NO: 2047 - protein, 163 aa, synthetic construct
VLYNFAPFFAFKCYGVSPTKLNDLCFTNVYADSFVIRGNEVSQIAPGQTGNIADYNYKLPDDFTGCVIAWNSNKLDSKVGGNYNYRYRLFRKSNLKPFERDISTEIYQAGNKPCNGVAGVNCYFPLQSYGFRPTYGVGHQPYRVVVLSFELLHAPATVCGPKK

SEQ ID NO: 2048 - protein, 163 aa, synthetic construct
VLYNFAPFFAFKCYGVSPTKLNDLCFTNVYADSFVIRGNEVSQIAPGQTGNIADYNYKLPDDFTGCVIAWNSNKLDSKVSGNYNYLYRLFRKSKLKPFERDISTEIYQAGNKPCNGVAGFNCYFPLQSYGFRPTYGVGHQPYRVVVLSFELLHAPATVCGPKK

SEQ ID NO: 2049 - protein, 163 aa, synthetic construct
VLYNFAPFFAFKCYGVSPTKLNDLCFTNVYADSFVIRGNEVSQIAPGQTGNIADYNYKLPDDFTGCVIAWNSNKLDSKVSGNYNYLYRLFRKSKLKPFERDISTEIYQAGNKPCNGVAGSNCYFPLQSYGFRPTYGVGHQPYRVVVLSFELLHAPATVCGPKK

SEQ ID NO: 2050 - protein, 163 aa, synthetic construct; identical to SEQ ID NO: 2047

SEQ ID NO: 2051 - DNA, 489 bp, synthetic construct
  source 1..489: mol_type = other DNA
gtactttataacttcgctccctttttcgctttcaaatgttacggagtgagccctacaaaattgaacgatctctgcttcaccaacgtctatgcagacagttttgttatccgtggcaatgaagtgagccagattgcacccggtcaaactgggaacattgccgactataactacaaacttcccgacgacttcacagggtgtgtaatcgcttggaacagcaataaactcgactctaccgttggaggaaactacaattatcgctaccgccttttccggaagtctaaactcaagccctttgagcgggacattagcactgagatatatcaggcaggtaacaaaccatgcaatggagtagctggtgtaaactgctatttcccacttcagtcatacggatttagacccacatacggtgttggacaccaaccatatcgtgtggttgtgctcagttttgaactccttcatgcccctgccaccgtgtgtgggcctaaaaag

SEQ ID NO: 2052 - DNA, 489 bp, synthetic construct
  source 1..489: mol_type = other DNA
gttttgtataacttcgcccccttcttcgcattcaagtgttatggcgtcagcccaaccaagcttaatgacctctgttttacaaacgtctacgctgatagcttcgtgatacgtggtaatgaagtaagtcaaatagcccctggccagactggtaacattgcagactacaattataaacttccagatgactttactgggtgtgtaatcgcttggaatagtaataagctcgactctaagccctccgggaattacaactaccgatatcggcttttcagaaagtctaagctcaaaccatttgagcgcgacataagcacagagatatatcaagcaggcaataagccttgtaacggcgtagctggtagtaattgttactcccccctgcaaagttatgggttcaggccaacttatggggtggggcaccagccctacagagttgtcgtactgagctttgagctgctccatgctccagctacagtgtgtggacccaagaaa

SEQ ID NO: 2053 - DNA, 489 bp, synthetic construct
  source 1..489: mol_type = other DNA
gtgctctacaacttcgcacctttcttcgctttcaagtgttacggtgtttcccccactaaacttaatgatctgtgctttactaacgtgtacgcagactcattcgttattcggggtaacgaggtttcccaaatcgctcccggtcaaaccggaaacatcgctgattacaactataagttgcctgatgactttactgggtgtgtcatcgcatggaattccaacaaactggatagtaaagttggaggtaactacaattaccgatacaggcttttccgtaaatccaatctgaagcccttcgagcgcgatattagtactgaaatatatcaggctggtaataaaccttgcaatggggtggctggagtaaactgctactttcctcttcagagttacgggttcaggcccacctatggagtcggacatcaaccataccgtgtggttgtactgtcatttgaactccttcacgctcccgctaccgtgtgcggcccaaagaaa

SEQ ID NO: 2054 - DNA, 489 bp, synthetic construct
  source 1..489: mol_type = other DNA
gttctttacaatttcgctccctttttcgccttcaagtgttatggggtctctcctactaaactcaatgacctgtgctttaccaatgtgtacgccgattccttcgttatacgagggaatgaggtaagtcaaatagcccctggacaaaccggcaacattgctgattacaattacaaactgcctgacgatttcaccggttgtgtaatagcctggaattccaataaactggattctaaagtatcaggcaactacaactatctttacaggttgtttagaaaaagcaagctgaagcccttcgagcgcgatatttcaacagagatatatcaagcaggaaataaaccatgcaacggcgtcgccggcttcaattgctacttccctttgcaaagttatggttttcgacctacatacggtgtcggtcatcagccctaccgcgtggtcgtcctgtcctttgaacttcttcacgccccagccaccgtatgtggtcccaagaag

SEQ ID NO: 2055 - DNA, 489 bp, synthetic construct
  source 1..489: mol_type = other DNA
gtgctctacaattttgcaccctttttcgccttcaagtgttacggtgtgagccctactaagttgaatgacctctgttttacaaatgtgtacgctgactcattcgtgatacgtggtaacgaagtgagtcaaatagcccctgggcaaacaggtaacatcgctgactataactacaagttgcccgacgattttacagggtgtgttatagcatggaacagtaacaagctcgattcaaaggtgagcggaaattacaactacctctatcgactctttaggaaatccaagctcaagccattcgagagagatatatcaaccgaaatttaccaggctggtaacaagccatgcaatggggtcgcaggatccaactgttatttcccattgcagtcatacggcttcaggcccacttatggggtaggtcatcaaccctaccgggtcgtcgtcctttcttttgaacttctgcacgcaccagccaccgtatgcggccccaagaag

SEQ ID NO: 2056 - DNA, 489 bp, synthetic construct
  source 1..489: mol_type = other DNA
gtgctctataacttcgctcccttctttgcttttaaatgctacggagtctcccctacaaagctgaacgacctttgcttcactaatgtctacgccgatagctttgttatcagaggaaatgaagtatcacagatcgcaccaggtcagacaggcaacatcgcagactataactataaacttcccgacgattttactggctgtgtcattgcttggaactcaaataaactcgactcaaaggtgggaggaaattacaactatcgttataggctgttcaggaaaagtaatctcaagccattcgagcgagacattagtacagagatttaccaggctggaaacaaaccttgcaatggtgtcgcaggcgtcaactgctacttcccattgcagagctacggcttcaggccaacatacggtgtgggacaccagccttaccgagttgtggtcctgtcctttgaacttctccacgcacctgctaccgtctgtggacccaaaaaa

SEQ ID NO: 2057 - protein, 207 aa, synthetic construct
NITNLCPFDEVFNATKFASVYAWNRKRISNCVADYSVLYNSASFSAFKCYGVSPTKLNDLCFTNVYADSFVIRGNEVSQIAPGQTGNIADYNYKLPDDFTGCVIAWNSNKLDSKVGGNYNYRYRLFRKSNLKPFERDISTEIYQAGNKPCNGVAGFNCYFPLRSYGFRPTYGVGHQPYRVVVLSFELLHAPATVCGPKKSTNLVKNK

SEQ ID NO: 2058 - protein, 207 aa, synthetic construct
NITNLCPFDEVFNATRFASVYAWNRKRISNCVADYSVLYNSAPFSAFKCYGVSPTKLNDLCFTNVYADSFVIRGNEVSQIAPGQTGNIADYNYKLPDDFTGCVIAWNSNKLDSKVGGNYNYLYRLFRKSNLKPFERDISTEIYQAGNKPCNGVAGFNCYFPLRSYGFRPTYGVGHQPYRVVVLSFELLHAPATVCGPKKSTNLVKNK

SEQ ID NO: 2059 - protein, 207 aa, synthetic construct
NITNLCPFDEVFNATRFASVYAWNRKRISNCVADYSVLYNFAPFFAFKCYGVSPTKLNDLCFTNVYADSFVIRGNEVSQIAPGQTGNIADYNYKLPDDFTGCVIAWNSNKLDSKVGGNYNYRYRLFRKSNLKPFERDISTEIYQAGNKPCNGVAGFNCYFPLRSYGFRPTYGVGHQPYRVVVLSFELLHAPATVCGPKKSTNLVKNK

SEQ ID NO: 2060 - protein, 207 aa, synthetic construct
NITNLCPFDEVFNATRFASVYAWNRKRISNCVADYSVLYNSASFSAFKCYGVSPTKLNDLCFTNVYADSFVIRGNEVSQIAPGQTGNIADYNYKLPDDFTGCVIAWNSNKLDSKVGGNYNYRYRLFRKSNLKPFERDISTEIYQAGNKPCNGVKGFNCYFPLRSYGFRPTYGVGHQPYRVVVLSFELLHAPATVCGPKKSTNLVKNK

SEQ ID NO: 2061 - protein, 207 aa, synthetic construct
NITNLCPFDEVFNATRFASVYAWNRKRISNCVADYSVLYNFAPFFAFKCYGVSPTKLNDLCFTNVYADSFVIRGNEVSQIAPGQTGNIADYNYKLPDDFTGCVIAWNSNKLDSKVGGNYNYRYRLFRKSNLKPFERDISTEIYQAGNKPCNGVKGFNCYFPLRSYGFQPTYGVGHQPYRVVVLSFELLHAPATVCGPKKSTNLVKNK

SEQ ID NO: 2062 - protein, 207 aa, synthetic construct
NITNLCPFDEVFNATRFASVYAWNRKRISNCVADYSVLYNSASFSAFKCYGVSPTKLNDLCFTNVYADSFVIRGNEVSQIAPGQTGNIADYNYKLPDDFTGCVIAWNSNKLDSKVGGNYNYLYRLFRKSNLKPFERDISTEIYQAGNKPCNGVAGFNCYFPLQSYGFQPTYGVGYQPYRVVVLSFELLHAPATVCGPKKSTNLVKNK

SEQ ID NO: 2063 - protein, 207 aa, synthetic construct
NITNLCPFDEVFNATRFASVYAWNRKRISNCVADYSVLYNFAPFFAFKCYGVSPTKLNDLCFTNVYADSFVIRGNEVSQIAPGQTGNIADYNYKLPDDFTGCVIAWNSNKLDSKVGGNYNYLYRLFRKSNLKPFERDISTEIYQAGNKPCNGVAGFNCYFPLRSYGFRPTYGVGHQPYRVVVLSFELLHAPATVCGPKKSTNLVKNK

SEQ ID NO: 2064 - protein, 207 aa, synthetic construct
NITNLCPFDEVFNATRFASVYAWNRKRISNCVADYSVLYNLASFSTFKCYGVSPTKLNDLCFTNVYADSFVIRGDEVRQIAPGQTGNIADYNYKLPDDFTGCVIAWNSNKLDSKVSGNYNYLYRLFRKSNLKPFERDISTEIYQAGNKPCNGVAGFNCYFPLRSYSFRPTYGVGHQPYRVVVLSFELLHAPATVCGPKKSTNLVKNK

SEQ ID NO: 2065 - protein, 207 aa, synthetic construct
NITNLCPFDEVFNATKFASVYAWNRKRISNCVADYSVLYNSASFSAFKCYGVSPTKLNDLCFTNVYADSFVIRGNEVSQIAPGQTGNIADYNYKLPDDFTGCVIAWNSNKLDSKVSGNYNYRYRLFRKSNLKPFERDISTEIYQAGNKPCNGVKGFNCYFPLRSYSFRPTYGVGHQPYRVVVLSFELLHAPATVCGPKKSTNLVKNK

SEQ ID NO: 2066 - protein, 207 aa, synthetic construct
NITNLCPFDEVFNATRFASVYAWNRKRISNCVADYSVLYNSAPFSAFKCYGVSPTKLNDLCFTNVYADSFVIRGNEVSQIAPGQTGNIADYNYKLPDDFTGCVIAWNSNKLDSKVGGNYNYRYRLFRKSNLKPFERDISTEIYQAGNKPCNGVAGFNCYFPLRSYGFRPTYGVGHQPYRVVVLSFELLHAPATVCGPKKSTNLVKNK

SEQ ID NO: 2067 - DNA, 621 bp, synthetic construct
  source 1..621: mol_type = other DNA
aatatcacaaatctctgcccatttgacgaagtatttaacgccaccaagtttgcttcagtctatgcttggaaccggaaaaggatttctaattgtgtagccgactatagtgtcctctacaattccgcctcattttcagcctttaaatgctacggtgtatcacctactaagctcaacgatttgtgttttacaaacgtgtatgctgattcctttgtgattcgtggcaacgaagtttctcagatagcccctggtcagactggcaacattgcagattacaactataaactgccagatgactttactgggtgtgttatagcctggaatagtaataaacttgactcaaaagtcggtgggaactataactatcgttatcgactctttcgtaaatcaaacctgaagcctttcgagagagatatatctacagagatttaccaagctggtaacaaaccttgcaacggagtagctggctttaattgttatttccctctgcgttcctatggttttcgaccaacctacggggtgggtcatcagccataccgggtcgtagtgctgagcttcgaactgttgcacgcccctgcaaccgtgtgcggccctaaaaagtcaactaacctggttaagaataag

SEQ ID NO: 2068 - DNA, 621 bp, synthetic construct
  source 1..621: mol_type = other DNA
aacatcactaatctgtgcccttttgacgaggtgttcaacgcaacccgatttgcctcagtctatgcatggaacagaaagcgcatcagtaactgcgttgccgattatagcgttttgtataactctgcaccattctctgcattcaagtgttatggtgtgtcacctacaaagctcaatgacctttgtttcaccaatgtgtatgctgactcttttgtgatccgagggaacgaggtaagtcagattgcacccggacagaccggtaatattgctgactacaattacaaattgccagatgactttacaggatgcgtcattgcttggaactccaacaagctcgatagcaaagtgggggggaattataactatctttatcgactgttccgtaagtcaaatttgaaaccatttgagcgcgatataagtacagagatttaccaggcagggaacaagccttgcaacggggtcgctggttttaattgttacttccctctgaggagttatggatttcgtccaacatatggtgtgggccatcaaccataccgagttgtagtccttagtttcgagttgctccatgctccagccacagtttgtggccccaaaaaaagcaccaaccttgtaaagaacaag

SEQ ID NO: 2069 - DNA, 621 bp, synthetic construct
  source 1..621: mol_type = other DNA
aacattaccaacctgtgtcccttcgacgaggtcttcaacgcaacacggttcgcctcagtctatgcttggaaccgaaaacgtatctccaactgcgtcgcagactatagcgtcttgtacaatttcgctccttttttcgcatttaagtgctacggcgtgtccccaactaaattgaatgacttgtgttttactaatgtgtatgctgactccttcgtaattcgcggtaacgaggtatcccagatagcacctggtcagaccggcaacatagccgattataactacaaactgcctgatgattttaccggatgtgtgatcgcttggaattccaataaacttgacagtaaagttggaggcaattacaattatcgctatagactgttcagaaaaagtaatttgaagccttttgaaagagacattagtacagagatataccaagccggaaataaaccttgtaacggcgttgcagggtttaattgttacttccccctgcgatcatacgggtttcgtccaacctatggggtagggcaccaaccttacagagtagttgttctgagttttgagctcttgcacgcacctgctacagtttgcggacccaagaaatccacaaatttggtgaagaataag

SEQ ID NO: 2070 - DNA, 621 bp, synthetic construct
  source 1..621: mol_type = other DNA
aatataaccaatctctgtcctttcgacgaagttttcaacgccactcggtttgcctctgtgtatgcatggaatcgaaaaagaatttcaaattgcgtggccgattactctgttctttacaacagtgcatccttctccgctttcaaatgttatggagtgagtccaaccaagcttaatgatctttgcttcaccaacgtctatgcagactcatttgttatacgtgggaatgaagtttctcagatcgcccctggacagaccggcaacattgcagactacaattacaagctgcctgatgattttacaggttgcgtaatcgcctggaactcaaacaagctcgattccaaagtaggggggaattacaactacagataccgattgtttcgtaaaagcaatctgaaaccttttgagcgtgatatttctactgaaatttaccaagctggaaataagccttgtaatggggttaagggatttaattgttacttccctttgaggtcttacggtttccgccccacttatggcgtaggacaccaaccatatcgggtggtggtcctttcattcgagctgctgcacgcaccagcaactgtttgcggaccaaagaagtcaaccaacctggttaaaaataaa

SEQ ID NO: 2071 - DNA, 621 bp, synthetic construct
  source 1..621: mol_type = other DNA
aacattacaaacctgtgtccttttgacgaggtgttcaatgctactcggttcgcatccgtttatgcatggaaccgtaaacgcatctcaaattgtgtcgccgactactcagtgctctacaactttgccccattctttgcatttaagtgttacggtgtatcacccaccaagctcaacgacctctgcttcactaacgtttatgccgattcctttgtgataaggggcaacgaagtgagccaaatcgcccccggacaaactggtaacatcgccgattataattataaacttcccgacgactttactgggtgcgtgatagcatggaactcaaacaaactcgattccaaggtcggcggtaattataattatcggtataggctcttccgtaagtctaatctcaaacctttcgaacgggatatttcaacagagatttatcaggctgggaataaaccatgtaacggagtaaagggcttcaactgttactttccccttcgaagctacggtttccagccaacctacggggtgggccaccagccctaccgtgtagtcgtccttagcttcgagttgctccatgccccagccactgtgtgcggaccaaagaagagcaccaatcttgttaagaataag

SEQ ID NO: 2072 - DNA, 621 bp, synthetic construct
  source 1..621: mol_type = other DNA
aatatcacaaatctctgtccttttgatgaggtttttaatgcaacacgctttgccagcgtctatgcatggaaccggaaaagaataagtaattgcgtagcagattactctgtcctctataattctgcatcattctctgcattcaaatgttatggggttagtcccacaaagttgaacgatctttgcttcaccaacgtatatgcagacagcttcgtcattagggggaacgaagtatcacagatcgctcccggacaaactgggaacatagccgactacaattataagttgcctgatgactttacaggttgcgtcattgcttggaactcaaataaactcgattccaaggtcggcggcaattataactatctttataggcttttccgtaagtctaatctgaagccttttgagagagatatatctactgaaatctaccaggcaggtaataagccttgtaacggcgtagctggtttcaactgttatttcccccttcaatcatatggtttccaaccaacctacggagtcgggtatcagccttaccgcgtagtagttcttagtttcgagttgcttcatgctccagccaccgtgtgtggtcctaagaaatcaacaaatctcgtcaaaaataaa

SEQ ID NO: 2073 - DNA, 621 bp, synthetic construct
  source 1..621: mol_type = other DNA
aacatcacaaacctttgtccttttgatgaggtatttaatgccaccaggttcgcatctgtctacgcatggaatagaaaacggatctctaattgcgttgccgattatagcgtgctttacaacttcgctcccttctttgcttttaagtgctatggagtcagcccaacaaagctcaatgatctctgtttcacaaatgtttacgcagatagctttgtcatccgcggcaacgaggtttcccaaatagcaccaggtcagactggtaacatcgcagactataactataaactcccagacgattttactgggtgtgttattgcttggaatagcaataagttggactctaaggtcggtggaaactataattatttgtatagattgttcagaaaaagtaacctcaaaccattcgagagagacatttcaactgagatataccaagcaggtaacaaaccttgcaatggggtagcaggttttaattgctatttcccactgcgaagctatggtttccgtccaacctatggtgtcggccatcagccttaccgcgtagtggtcctctcctttgaacttcttcacgctcctgcaacagtttgtggccccaaaaagtcaacaaacctcgtcaaaaataag

SEQ ID NO: 2074 - DNA, 621 bp, synthetic construct
  source 1..621: mol_type = other DNA
aatattacaaatctctgcccatttgacgaagtcttcaatgcaacccgcttcgcttcagtctacgcctggaaccgcaagcgcatcagcaactgtgtagccgattatagtgttctctataatttggcctctttctccaccttcaaatgttatggtgtcagccctactaaacttaacgacctctgctttaccaacgtatatgccgattcattcgtgatccgtggcgatgaggtgcgccagattgccccagggcaaaccggcaacatagccgactataactataagctccccgatgacttcactggttgcgtaatcgcttggaattccaataaactcgactccaaagtcagtggtaactataattacctctatcgcctctttcggaaatcaaatctcaagcctttcgaacgcgatatttccacagaaatataccaggcaggtaataagccatgtaacggggtcgccgggttcaattgctattttcctcttaggtcatactcctttcggcccacttatggcgtgggacaccagccttaccgcgttgtagtgctttcctttgaattgctgcatgccccagctactgtctgtgggcctaagaagagtaccaatcttgtgaagaataag

SEQ ID NO: 2075 - DNA, 621 bp, synthetic construct
  source 1..621: mol_type = other DNA
aacattaccaatctgtgtccttttgacgaagtcttcaatgctacaaaatttgctagcgtctacgcatggaaccgtaaacgaataagtaactgcgtggccgactactctgtcttgtataactctgccagcttctcagccttcaagtgctatggtgttagcccaaccaaactgaatgacctgtgttttaccaacgtctacgccgattccttcgtcatccgtggtaacgaggtctctcaaatagcacccggacaaacagggaatatcgcagattacaattataaacttcctgatgactttactggctgcgtgatcgcttggaatagcaataaactggattctaaggtgtccggcaactataattaccgatatcgcctctttcgcaagtctaatctcaaaccctttgaacgcgacatcagcacagaaatctatcaagctggcaataagccctgcaacggggttaagggattcaactgttattttcccctcaggtcatattcctttagacctacttacggtgtaggccatcagccctatcgtgtggtagtgcttagtttcgaactgcttcacgctcccgctacagtttgcggaccaaaaaagtctaccaatctggttaagaataaa

SEQ ID NO: 2076 - DNA, 621 bp, synthetic construct
  source 1..621: mol_type = other DNA
aacatcacaaacttgtgcccttttgatgaagtgttcaacgctactcgctttgcctcagtctacgcttggaacagaaagcggataagcaattgtgtcgcagactactccgttctctataactctgccccctttagcgcattcaaatgttacggagtgtctcctactaaacttaacgatctctgctttacaaacgtatatgctgattccttcgtgattagggggaacgaggtctcccaaattgcacccggccagaccgggaacatcgcagactataactacaagctgcctgatgattttactggatgcgttatcgcctggaatagcaacaaactcgacagtaaagttggcgggaactacaactacagataccgtctttttcggaaaagcaatctcaaaccttttgaaagagacatatcaacagaaatatatcaggcaggcaataaaccttgtaatggagtagctggattcaactgttactttccacttcggagttacgggtttcgtccaacatatggtgtcgggcaccaaccttatcgtgtagtagtgctcagttttgaacttcttcacgctccagctaccgtgtgtggtcctaagaaatccaccaatctggtgaagaacaag

1. A recombinant polypeptide comprising at least one immunogenic fragment of Severe Acute Respiratory Syndrome Coronavirus 2 (SARS-CoV-2) spike glycoprotein, wherein each immunogenic fragment comprises an N-terminus region, wherein the N-terminus region comprises an amino acid sequence selected from the group consisting of SEQ ID NOs: 245-289 and 293-362, and amino acid sequences DYS, YS, and S.

2. The recombinant polypeptide of claim 1, wherein each immunogenic fragment further comprises a C-terminus region, and the C-terminus region comprises an amino acid sequence selected from the group consisting of SEQ ID NOs: 363-398 and 402-423, and amino acid sequences STN, ST, and S.

3. A recombinant polypeptide comprising at least one immunogenic fragment of SARS-CoV-2 spike glycoprotein, wherein each immunogenic fragment comprises an N-terminus region and a C-terminus region, and wherein the N-terminus region comprises an amino acid sequence that differs at at least 2 residues from an amino acid sequence selected from the group consisting of SEQ ID NOs: 245-289 and 293-362, DYS, YS, and S, and the C-terminus region comprises an amino acid sequence that differs at at least 2 residues from an amino acid sequence selected from the group consisting of SEQ ID NOs: 363-398 and 402-423, STN, ST, and S.

4. A recombinant polypeptide comprising at least one immunogenic fragment of SARS-CoV-2 spike glycoprotein, wherein each immunogenic fragment comprises an N-terminus region and a C-terminus region, and wherein the N-terminus region comprises an amino acid sequence of at least five contiguous amino acid residues of an amino acid sequence selected from the group consisting of SEQ ID NOs: 245, 293, 314, and 342, and the C-terminus region comprises an amino acid sequence of at least five contiguous amino acid residues of an amino acid sequence of SEQ ID NO: 363 or 402.

5. The recombinant polypeptide of claim 4, wherein each immunogenic fragment comprises an N-terminus region and a C-terminus region, and wherein the N-terminus region comprises an amino acid sequence of at least ten contiguous amino acid residues of an amino acid sequence selected from the group consisting of SEQ ID NOs: 245, 293, 314, and 342 and the C-terminus region comprises an amino acid sequence of at least ten contiguous amino acid residues of an amino acid sequence of SEQ ID NO: 363 or 402.

6. The recombinant polypeptide of claim 2, wherein each immunogenic fragment comprises an intervening region between the N-terminus region and the C-terminus region, and wherein each intervening region comprises an amino acid sequence selected from the group consisting of SEQ ID NOs: 2045-2050 or that differs at at least 4 residues from an amino acid sequence selected from the group consisting of SEQ ID NOs: 603-606, and 2037-2040.

7. The recombinant polypeptide of claim 1, wherein each of the at least one immunogenic fragments comprises an amino acid sequence with at least 95% sequence identity to an amino acid sequence independently selected from the group consisting of SEQ ID NOs: 1577-1661 and 1917-1946.

8. The recombinant polypeptide of claim 1, wherein the polypeptide comprises at least two immunogenic fragments.

9. The recombinant polypeptide of claim 1, wherein each immunogenic fragment of the at least one immunogenic fragments comprises the same amino acid sequence.

10. The recombinant polypeptide of claim 8, wherein each immunogenic fragment of the at least one immunogenic fragment comprises a different amino acid sequence from each of the other immunogenic fragments.

11. The recombinant polypeptide of claim 1, wherein the recombinant polypeptide is expressed at a concentration of at least 45 mg protein/L culture.

12. The recombinant polypeptide of claim 1, wherein the recombinant polypeptide exhibits at least 85% protease resistance.

13. The recombinant polypeptide of claim 1, wherein the recombinant polypeptide does not comprise an amino acid sequence selected from the group consisting of SEQ ID NOs: 1, 3, 5, 7, 9, 11, 13, 15, 17, 19, 21, 23, 25, 27, 29, 31, 33, 35, 37, 39, 41, 43, 45, 47, 49, 51, 53, 55, 57, 59, 61, 63, 73, 75, 77, 79, 81, 83, 85, 87, 89, 91, 93, 95, 97, 99, 101, 103, 105, 107, 109, 111, 113, 115, 117, 119, 121, 123, 125, 127, 129, 131, 133, 135, 137, 139, 141, 143, 145, 147, 149, 151, 153, 155, 157, 159, 161, 163, 165, 167, 169, 171, 173, 175, 177, 179, 181, 183, 185, 187, 189, 191, 217, 219, 221, 223, 225, 227, 229, 231, 233, 235, 237, 239, 241, 243, and 2057-2066.

14. The recombinant polypeptide of claim 1, wherein the recombinant polypeptide further comprises an antibody Fc region.

15. The recombinant polypeptide of claim 1, wherein the polypeptide comprises at least two immunogenic fragments, and wherein the at least two immunogenic fragments are connected to each other via a linker.

16. The recombinant polypeptide of claim 15, wherein the linker is a polypeptide comprising an amino acid sequence of 1-35 residues, wherein each residue is independently serine or glycine.

17. The recombinant polypeptide of claim 14, wherein the at least one immunogenic fragment of the SARS-CoV-2 spike glycoprotein is connected to the antibody Fc region via a linker.

18. The recombinant polypeptide of claim 17, wherein the linker comprises an amino acid sequence selected from the group consisting of SEQ ID NOs: 65 (Fc1), SEQ ID NO: 67 (Fc1-TEV), SEQ ID NO: 69 (Fc1-Rv3C), SEQ ID NO: 193 (Short), SEQ ID NO: 195 (Medium), and SEQ ID NO: 197 (Long).

19. The recombinant polypeptide of claim 14, wherein the antibody Fc region is from a human IgG1 antibody or derived therefrom.

20. The recombinant polypeptide of claim 19, wherein the antibody Fc region comprises the amino acid sequence of SEQ ID NO: 71.

21. The recombinant polypeptide of claim 1, wherein the polypeptide comprises an amino acid sequence with at least 95% sequence identity to an amino acid sequence selected from the group consisting of SEQ ID NOs: 1662-1746 and 1947-1976.

22. The recombinant polypeptide of claim 21, wherein the polypeptide comprises an amino acid sequence selected from the group consisting of SEQ ID NOs: 1662-1746 and 1947-1976.

23. A recombinant polynucleotide encoding the polypeptide of claim 1.

24. The recombinant polynucleotide of claim 23, wherein the polynucleotide comprises a nucleic acid sequence with at least 93% sequence identity to a nucleic acid sequence selected from the group consisting of SEQ ID NOs: 1832-1916 and 2007-2036.

25. The recombinant polynucleotide of claim 24, wherein the polynucleotide comprises a nucleic acid sequence selected from the group consisting of SEQ ID NOs: 1832-1916 and 2007-2036.

26. The recombinant polynucleotide of claim 23, wherein the nucleic acid sequence has been codon optimized.

27. A pharmaceutical composition comprising the recombinant polypeptide of claim 1 and a pharmaceutically acceptable carrier.

28. The pharmaceutical composition of claim 27, wherein the pharmaceutical composition further comprises at least one adjuvant, and
wherein the at least one adjuvant is selected from the group consisting of alum adjuvants, emulsion adjuvants, and pattern recognition receptor agonist adjuvants, or
wherein the at least one adjuvant is AS03, MF59, CpG, Squalene Emulsion, Alum, aluminum hydroxide gels, calcium phosphate hydroxide, paraffin oil, cytokines (IL-1, IL-2, IL-12), killed bacterial products such as Bordetella and Mycobacterium bacteria, bacterial toxoids, squalene and DL-α-tocopherol emulsions, aluminum phosphate gels, saponins, cyclic dinucleotides, and TLR agonists, and any combination thereof, or
wherein the at least one adjuvant is a squalene-oil-in-water emulsion adjuvant.

29. The pharmaceutical composition of claim 27, wherein the pharmaceutical composition does not comprise an adjuvant.

30-32. (canceled)

33. A vector comprising the recombinant polynucleotide of claim 23.

34. An isolated cell comprising the polypeptide encoded by the recombinant polynucleotide of claim 23.

35. A method for preventing, inhibiting, reducing, eliminating, protecting, or delaying the onset of an infection or an infectious clinical condition caused by a beta coronavirus in a subject comprising administering to the subject the recombinant polypeptide of claim 1.

36. A method for inducing an immune response against a beta coronavirus in a subject comprising administering to the subject the recombinant polypeptide of claim 1.

37. The method of claim 35, wherein the recombinant polypeptide is administered by oral, parenteral, subcutaneous, intradermal, transdermal, intravenous, intramuscular, intranasal, intrapulmonary, intraarterial, intrathecal, or interperitoneal administration.

38. The method of claim 35, wherein the coronavirus is selected from the group consisting of SARS-CoV-2, SARS-CoV, and MERS-CoV

39. The method of claim 35, wherein the subject is a mammal.

40. The method of claim 39, wherein the mammal is a human or non-human primate.

41-42. (canceled)
